United States Patent Application Publication US 2020/0377945 A1 - sequence listing, part 30

SEQ ID NO: 5325 - DNA, 140264 bp, Unknown
  gut microbiota DNA sequence
caggtagcgatgaaaattaaatcagtggtcatccatcagcaggctgacgccgccgagtacccaaacgcctttggggatacggcctaaggtggcgaaacgcggaaccatcaatcactcctgattatcaaatggcgagtggctgattaaatcaggttgcgatgacgctggtaagtcggtttgtaaaataattctcaattgcgtttgggcgcagacctcgcttcgcccctcgcgaggagaggcgaagaatcgggcaggcgttagcggtatatcaccgcgctggcgcgaagcgggccgttggtttctggttcgtgcatcaggataggctgaaagtatttcgccccctgcgcatcgctcatctggctaagggcctgttcggcctcgtgctcagtggccatattgtgattgatatagataacgccgaggctctgcacgtcgtccatgttgcgggcctgacgttcggtgatttggatagctgccagcgcgttggcgctgaagaaaagcgcagccatcatggcgatgattttcagtttcatatactacgctcctgactgacagtcctgacgctgactcggggctctcctgtgatcgttgggctttgatagaagtgtaatcgctgcgcgttcatcgcatggcgaccttttctgatgcagttgttcaaaaaaatgccgcttcctttattggttaattttaaatcacccacttagcccagcttggcgcttagtgcgaattatttgtgcaaatgcgcttgtgttcctgaggggccgccattagaatgacgcgtcaatttttcagccgccctttaacacgttccttgcctccatgggccgcggctgacccagacaggaggctgaataatccgtaaggagcaattcgatgcgtcattacgaaatcgtttttatggtccatcctgaccagagcgaacaggttccgggcatgatcgaacgttacactggtgcaattactgcagcagcaggtacgatccaccgtctggaagactggggccgccgtcagctggcttatccgatcaacaaactgcacaaagctcactacgttctgatgaacgttgaagcgccgcaggaagcgatcgatgagctggaaactaacttccgcttcaacgacgccgttatccgcagcatggtaatgcgtactaagcacgctgttaccgaagcatctccgatggttaaagcgaaagacgagcgccgtgagcgtcgcgaagatttcgccaacgaaaccgcagatgattctgaagctggggattctgaagagtaatcctgatgaccaaccgtctggagctgtccggcattatttgcaggactccacttcgtaaggtcagcccgtcaggaattcctcactgccagttcgtgcttgagcatcgttcagtgcaggaggaagccggttttcaccggcaggcatggtgtcagatgcccgttattattagcggtcatgagaaccaggccattactcacagtataacggtcggtagcgcagtaaccgttcgagggttcatctcttgccataaggcaaagaacggcttgagcaaaatggttctgcatgccgagcagattgaattgatagattctggagactagccatatggcacgttatttccgtcgtcgcaagttctgccgtttcaccgcggaaggcgttcaagagatcgactataaagatatcgctacgctgaaaaactacatcaccgaaagcggtaagattgtcccgagccgtatcaccggtacccgtgcaaaataccagcgtcagctggctcgcgctatcaaacgcgctcgctacctgtccctgctgccgtacactgatcgtcatcagtaatcggtcacggtccattaatacgactttgagaggataaggtaatgcaagttattctgcttgataaagtagcaaacctgggtagcctgggtgatcaggttaacgttaaagcgggctatgctcgtaacttcctggtcccgcagggtaaagctgttcctgctaccaagaaaaacgttgaattcttcgaagcacgtcgtgctgaactggaagccaaactggctgacgttctggcagcagctgaagctcgtgctgagcagatcaacgccctggaatccgtaaccatcgcgtctaaagctggcgacgaaggtaaactgttcggttccatcggtactcgcgacatcgctgacgctgttactgcagcaggcgttaaagttgctaagagcgaagttcgcctgccgaacggcgttctgcgtaacgttggcgagcacgaagtgaacttccaggttcacagcgaagtattcgctaaagttatcatcaacgtggttgctgagtaatcggcctctgacgttctggtaacaacaaaccgccggccttgtgccggcgttttgctttttagcgcctttcattttgcggcggcgtaacgcttgctgtcgtcttctctgctatcgcgcacgcacaaagctgccgttcgactggcgggtaaacagcacctgctggccgttgccggtatcgatagtgagcccggtgaccacgccgttggcgttctgccgaatctgcaccgtctgtccgctctgcaaagtacttagcggcttgccagcgccttcaacctgcgccatggcgtagacgtcagtggccggcagcccatgatcgcggaacagctgcgccagggttttgcctgactcgatgcgataggtccgccattgctgctcaatacccggcgcggactgctgtgatgaggattgataaggctgggtggcggcgggctgctgcgtctgcgcttgatccggctgctcatcctgaatcggctccggggcgaccggcgccatctgatcggcgtcgctcacggtaggcgtattagtgatcggcggcagcggaacggcctgattgccgccagcttgcggctgggactgcgactgtagattcaggttcgcttcacggctggtcgacgccgggctttggctatcatcggagggaagcagaataccaataataaccaacaggaagccagcgataattccccggcggtgcatcggaggcagcgggtccaggaggcgaaaatgatccggggcgtgccagattttcgccagggtagatgtcagttcaaagcgcccgggcatggctttcctcctgctccgcatatttatatcctgctcatgagtatagatggctaacgtcctgatgaccggaacaaagtgaagttaacctgctgccgcctattgtttctttttcgctgagatttgtcatcatccgccgacaaagttttacccatttcgctatggctgttatgctttcgcacgcttttatcttgatgtttatcacccaaaaaggaacaacgatggcaaccccaacttttgacactatcgaagcgcaggcaagttacggtatcggcttgcaggttggacaacagctgagcgaatccggcctgcaggggctgctgccggaagcgctggtggcgggtatcgccgatgcgctggaaggtaaccagccgcaggtgccggtggaagccgttcaccgcgcgctgcgtgaaatccacgagcgtgctgacgctgtgcgtcgcgagcgttttcaggccatggccgctgacggccaaaaataccttgatgaaaaccgcgagaaagaaggtgtgaacagcaccgagtctggtctgcagttccgcgtactgacccagggcgaaggcccgatcccggcgcgtactgaccgcgttcgcgtgcactacactggcaaactgatcgacggcaccgtcttcgacagctccgttgctcgcggtgaaccggctgaattcccggtgaccggcgtgatcggcggctggattgaagcgctgactctgatgccggtaggttccaaatgggaactgacgatcccgcacaacctcgcctacggtgagcgcggcgctggcgcatcgattcctccgttcagcaccctgatcttcgaagttgaactgctggacattatctaaacagcagcggcttcctcttccccgcggcaggggaagccataaaaatagcgtaaaatccttaagttaaaaattaattggaattatgttttgcattcatcacgtatgggtgtatttttgtgagctatttcgcgttagatgagtgatataacactcactttaaacataaaattaacattatatctaaatcatagtattcatccctccgattcttacctaatatcgactagcccttgctggggttaatgacagacgacgggccatcagagcctgaacaacacagacaggtacaacaggaagaaatcacatggtagatcaggttaaagtcgctgctgtcgagcaggagccgactgaacaatcgctacggcgaaatctcacaaaccgacatattcagctgatcgcgattggcggagcgatcggcaccgggttatttatgggttctggcaaaaccatcagccttgccggaccatccattatctttgtttatatgattatcggttttatgctgtttttcgtgatgcgtgccatgggcgaattactgctgtcgaacctcgaatataaatcctttagcgacttcgcggccgatctgctggggccgtgggcgggctactttaccggctggacctactggttctgctgggtagtgaccgggatggcggacgttgtcgccatcaccgcctacgcgcagttctggtttcccggactctccgactgggtcgcctcgctggcggtgatcctgctgctgctgggcctgaacctggccaccgtcaagatgtttggcgaaatggagttctggttcgcgatgatcaaaattgtcgccatcgtggcgctgatcgtggtcggcctggtaatggtgatgatgcatttcaaatcgccgaccggggtcgaagcctctttcgcccacctgtggaatgacggcggctggttcccgaaagggctgagcggcttcttcgccggcttccagattgcggtgtttgccttcgtggggattgagctggtgggtaccaccgccgccgaaaccaaagacccggaaaagtccctgccgcgggcgattaactccatcccgctgcgtatcattatgttctacgtcttcgcgctgattgtgattatgtcggtgacgccgtggagctccgtggtgccgagcaagagcccgttcgttgagctgttcgtgctggttggtctgccggcggcggcgagcctgatcaacttcgtggtgctgacctccgcggcctcctcggccaacagcggcgtgttctctaccagccgtatgctgttcggtctggcgcaggatggtcaggcgccgaagatgttcgccaagctgtcgaagcgtgcggtgccggcgaagggcttaaccttctcctgcatgtgtctgctgggcggggtggtgatgctgatggtcaacccgagcgtgattgccgccttcaccatgatcaccacggtgtcggcgatcctgtttatgttcgtctggaccatcatcctttgctcttacctggcgtatcgcaaaaaccgccctcagctgcatgagaagtcgagctacaagatgccgctgggtaaagtcatgtgctgggtgtgcatggccttcttcgtctttgtgctggtgctgttgaccctggaagacgatacccgtgaagcgctgatggtcaccccgctgtggtttgtgctgctgggcgcgggctggctgtttgccggcaaaaaacggctggcgaaataaacgaaaattttaacgttgcttgcaacggcccgtcataaaaaaggccacccggagtggccaaataagacggacaatgtcgagggcgcccgcgggcgcctttttctttactttccgccgagggcgcgcgggaacagcacattattttccaggctgatgtgttccatcagatcgtcgatcatctcgttgataccgttatacatcgccttccaggtggtacaggcttccggcggcggcgtcacgttgtgggtgatgtgcttaatgacttccagcagttcacccgcttcatcatgctcgctttccatcacgctgatcggccccccggcctgggcgcccattccctgtttgatcatcgggaacaggatctgttcctctttcatcatgtggctggaaagctcctgatgcagcatggtcaggtacttagtcagtcctttcggcacgttcggtttatcggcatggacgcgttcaaccttggtggcctgcaggatcagctccggcagctgttcacggtgccggtcgtgatagcgaacgatgatatggtcgataatctccgcgaggggcgccgcgcgccagtcgcgggaaagaggctgctcggccagtttcgccagctcggcttcaatcaccgcgacatccagcgctttgcgcgatgcggcgcgcgccagggtctgtttgccgccgcagcagtaatccatatcgtattgacggaacagggcggaggcgcgcgggatggtcatcgccagctcgcctaaaggttggtcacggaaagccatagcagttacctcgtcatcaggaatataagatgtattttaaatgcatctttttggcgagggaataccccttaaggaggcgaggctactttttttcgtccgccagcggctgcagcatcggtttttccggtctggcgcgtacggcggagaccacgccgagcaccagcagcaggatgccgctcagggtcagcagcggcggtaagctttgccgcagcaggaaggtatacagcagtccggccagggtttcgaagacgataagcgggccgaggatcaccgtcggcagccgctggctggcaatattccagcatagcgcgccgacccatgagcagagcaccgcgatggccagcatcagcgtaataaacaccgccggacgcgggccgaagggcaggggaaacccggcctgctgaccgtgcagccaggcgcaggcggcgagatagccggccagcgaaaccggaagcgtcaccagcgcctgagcggtagcccacatcattggcggttgatgcgggttctcccgcagccagcgggcgttgcgcagagcataccaggcccagcagaccaccgatcccagcgccagcgcaatgccggagccgtagcgccacgggctaaaattcggcagcccctggcgcagctccgcgacgttaacgcagatcaggcccacggcgatgcagatcagcgccggaaaaaggcgccgccacggcagcttcccgtcgcgctggctgtagagcagattggcgaacaccggcagtaccaccggcagcgtgccgataatcatggtggaaaccggcgccccggtgcgctgaatggcgctggccaggcagacgtaatagataaggttccccatcattgtcaggcccagcgcggtccaccagtcgtgccggctcaactggcgcagtcgcgcgcgcccgagccacgccagcggcagggcgatcaggcccagcgccagatagcgtcccatcgactgcagcatcgccggatactctggtaccagcaaaggcccgacgaaaattaaaccccacatcagccccgccagcagggcgtataacacaccactaatcatcattgcatccgttgtcattaccgttgtctgcagtgtagaagggggccgggcaggaatattgtatgagattgcgcattagcgcctggcgacctgcttctgatagcgcaccggcgtaatgccgtaacgctgggtgaaggcgcgggtcaggtgggactggtcggtgaggccgacggctatcgccacttcggcggcgggcatgccgtgggtgaggaacgctttggcgcgccacagacggatggccatcagcatctgatggggcgttacgtgatagtgggctttaaactggcgctgaaagtggtacgggctcagcgccgccacctgcgccagctcgtcgagggtgatggggcgcatatagttatcgtgcaggtagtcgcgcacgcggtcgaaacgatgcccggcctcaccttgcgcagaggcatggtgggccagagggcggaaggcgtcgatgaggtcgagcagcagtccctgctgggccagcggatcgtcgctatgccacaggccataaatcagctggccaatctgtcgggaacgcaggggatcctcgcggaccacctcgctgaaccaccagtcgcgcaccccggtgatggcttccagacggtccggctccagataaatcatccggtagcgccagccgtcggcggtttccgcttcgccggtgtgcagctcgtcgggattcatggtgacaatagcgttcgcggcggcgatgtgctggctgccgcggtagcgaaagcgctccgcgccttgctcaatcacgccgatgccgaaggcttcgtgggtatggggttcaaaggcgtagcgggaaatatgggcgtggtaaagctccaccccgggcaactgttcgagatggcgaaagcgcgcgcgatctttttcatcactaaattggagtggtacgccctgcatgcctgcctcccgacggttatcccttcaatatgagagaggaaccgccgggacgcaaccgcaaaagctgagaggggcggttacagaatgccttttacactctcggcaagggaggtggttggacggccgatcagcgtacttagggtgcggctgtcgtcaaacagtccgcctttcgacgcgccgacgtcggaatccgccagcatatcggcaagcccggccggcaggccgacgcttttcagcgcggcggcgaaatcggcttcgctgaggttctggtagaccacgtttttcccgctttgcttgctcagctcggcagccaggtcgctcagcgtccaggcgttatcacccgccagttcgtaaattttgccttcatgaccctcactggcgataacgcgggcggcagcggcggcataatccgcgcgggtggcggaggcgattttaccctcgccggcggcgccgataaacacgccatgctccagcgccggcggcgcgctggccagatagttttcggtataccagccgttacgcagcagggcgtaagcgataccagagtcggccagcatctgctcggtttcgatatgctctgcggccagacccagcggcgaagtgtcggcatgcagcaggctggtataggcgatgaatttcaccccggcggctttggcggcgttaatgacgttgcggtgctgtacagcacgctggccgacttcgctggaggagattaacagcagtttatccacgccctgcagcgcggcggtcagcgccgcttcgtcgctgtagtcggcctggcggacaaccacgccctgctggctgagcgcctgggctttggccgggttgcggacaatcgccacaatctggctggcagggacggtgttaagcaggtcttgcagaacgtagtggccaagctggccggtggcaccggtaagagcgatcatgggtcttctccttcgtatttattggcagttgtggtaagctaccaccttaactaacttttagtaagtacgtacaaaaaggtaagtgtgaaatggccgaaccgacgctgagcgagaaattgcgcaccggcaatttgtttgcggaacagtgcccgtcgcgcgatgtgcttaaacatgtcaccagccgctggggcgtgttgattctggtggcgctgcgcgagggaacccaccgtttcagcgatctgcgccgtaagatgggcggggtcagcgaaaagatgctggcgcagtcgctgcaggcgctggagcaggatggttttatcgaccgcgtctcttatccggtggtgcccccgcacgttgaatatagcctgacgccgctcggcctgcaggtgagcgagaaggtggccgccctggcggactggatcgaggttaatctgccctcggtgctggctaaccacggggagtgaaaatgtatcactccctgtagccccggtaagcgcagcgccaccggggaacaggcattacttgctcaaatccagctgataaatggcgaagccgatatcatcggtggccacctggcgcattggatactgcgctttctctttgataaacgctgcggctttgtcgccaggcgaggtctcaaaacgaatatccaacggcgtgttgctgtggatcggcgccagacgccagttgttatccgccgccggatggatcgcgccttccttcttcgattgcgcgccaatccatgccgccagcaccgaacggttttcatccggtgaggcgaaggcgatatggctctcaccggtgccggcgaatttgccgccgtaagcgcgatagttattggtcgcgaccaggaaagtagcctgcggatcaaccggttttccattgaaggtcaggtgcttaatacgctctgcctgcggatggatcatctgacattcgccgtcatagcgggccggctgagtgacgtcgatctggtagttcaccccgtcaatgacgtcgaagttgtaggtgcggaagccgtcccagttgatcagcgactgcggcttgctgctggcgggatcgatctggttaaactgtccggcagagcattccagccactccttaacctctttcccgctgaccttcatcaccaccagggtgttggggtagagatagaggtcggcggcattgcggaaggtgagctggcctttctccacttcgacaaagctcgccggatcgtttttacgcccgccgactttaaacggcgcggcggcggagagcaccggcagcttcgccagatccgggtcgccctgaatatagtgttcgacgtaggctttctgcgccatgttgaccacctgcaccgtcgggtcgtcctgcaccagcgccagatagctgtacatgttgtcggcggacttgccgatcggcttgctgacgaattcgcgagtggcgtcatgatcggctttcagcaccgccaccagcttgccatcttcggccgccagtgatttcttcgccaccgcgtcatagattggccgcgcttccgctttactctgagttacctgccatttaccgctgtcgttatttagcaccagatcgaccaccccgagatgatcgccccacattcccggcatcaccgccggtacaccgttcagcgtccctttggcgatatccgcgcctttgatgttggcgaagtctttacccgggaacaccgcgtgggcatggccgaacataatggcgtccacgccgggcacctggcttaagtagtaaaccgaattctcggccatcgcctgatacgggtcggcggagaggccggagtgagcgaccactaccaccacatcagcccctttcgcccgcatctccgggatatatttgcgcgcggtttcggtaatgtcattgaccgtcaccttgccgttaagattggctttatcccaggtcatgatctgcggcggcacaaagccgatatagccgatgcgcagggtgtgggattgaccgtcgctgtccacgacccgggtatcctggatcaggtacggcgtaaacatcggttttccggttttggcatcgatgatattggcgttcacgtaggggaacttcgccccggccagcgccttgtgcaggaagtcgagaccgtaattgaactcatggttgcccaggttgccgacggcgtaattcagggtgttcatcgccttatataccggatgtacatcgccctctttgagcccttttgccgccatatagtcgcctaacgggctcccctggatcacatccccgttatccaccagcacgctgtttttaacttctgcccgcgcctgttcgatcagggtggcggtacgcaccaggccgaatttctccgtggcggcatctttgtaatagtcgaagtccatcatattgctgtgcagatcggtggtttccatgatccgcaggtcgaccgtcgcggcgttgacgctggcggcgatcagcgtggccaggagcgttgcgctaaacttaatcatcagaggcgtccttttttatgagcgatagcacagaagaaaatgtatttatattctgttgcttacagaaatgtgaatcttgccagaaaagcgggcagagaaaccgccatcgttatcacagatagcggaactcgcggtgatgcgatataaataaaacaacgagttaacgccactgtaaccagacgaggtggagaatgttagaacaagtaagtcagcttgcacggaatgcgggcgatgccatcatggaagtctacgatggaaaccagccgatcaacgtcgccagcaagaaagatgattctccggtcacggcggcggatatcgcagcgcataaagtcattgtcagcggcctgcaggcgctggatccggataccccggtcctctccgaggaggacccgccggcgtgggaagtgcgccagcactggcagcgctactggctggtcgacccgctggacggcaccaaagagtttattaagcgtaacggcgaattcaccgtcaatatcgcgctgattgaaaacggcaagccgacgctgggcgttgtctatgcgccggtgatgaaggtgatgtacagcgcgcaaaatggcaaagcctggaaagaagagtgcggcgtacgcaagcagatccaggtccgcgatgcccgtccgccgctggtggtgattagccgctcccatagcaacgatccggagctgcaggagtaccttgagcaactgggcgaacaccagaccacctcaatcggttcgtcgctgaaattctgcctggtggcggaaggtcaggcccagctctatccgcgcttcgggccgaccagcacctgggacaccgccgccggccatgcggtcgcggtggccgccggggcgcatgttcacgactggcaggggaaaaccctcgactacacgccgcgtgaatccttccttaaccccggcttccgggtctctatttattaagcaatttatgcagcaggtcgatcacctgctgcacctcttgttgggtcagggcaccgtctttggcccactgcacgcgcccgttcttatccagcaccacgatcgccgagctcttctcgtccagctgccaggccttccgcactaggccgttgctgtcgacgataaattgcgaccatgggaagagctttttattactttcaatgctgttgcgtacaaacatcccggtgcccgggatggcgtcgtcagtgtttacaatggtggtggtctgatagcgatcgtgcgggaagcccgccgctttaatcgcctcgatcaggttggcattcttctcttttgctgacgagcgtccggcgatgtgctggaccacgcgcacttttcccgccagctgggcgctattccagtttttatagctaaacttatccttatccagaataagctctccccgatccgcgacgccaacgggcgccacgcgctggccgtcgacgaagttatgcgctgtggccagcagcgggagaagcagtaacgaggcggccagtatgctacgtagggtcatgcgcaatccttaatcatttttatgcaggtgatccgaccacttggtctcgtttaatcataagtgcgattgacggtgattacccgcaatgaggatgccagtttgcgtgttgacgcacaaattagtcgtaaaacggcgacttatacttacttcatcgtatgtctgaaacgaaaattctgaattattgtcatcaaagggtaaataaacttatacatactgggtccctctgagattctggactatagttttagggcattaaaatttgcgctcccaagacgtgggctaactgtggcaccacaagagcgtaaccctggcaggagagaagaatgaaaattttccaacgctacaatccgctgcaagtggcgaagtacgtgaagatcctgtttcgtggacggttgtacatcaaggacgttggcgcatttgaatttgataagggcaaaatccttatcccgaaggtcaaggacaagctgcatctgtcagtgatgtccgaagtcaatcgtcaggtgttgcgtctgcaaactgagatggcatagcctggcacgtagcagtacgtagtaggtaaaagacggctcccgatgggagccgttgatgtttttagcccttcatttccgcatagcgtttgcgatattcacccggcgggatgccgttatgtttacgaaacaagcgagtgaaatagaccggatcgctgtagcccaccgataaagcaattttgttaagtgggagcgaagtgctctgaataagccacctggcgcggttgatgcgctgcgtttcccgccacgcatagaccgtttgccccagttcatttttgaaaaggtgcgccagacgtgaaggggagataaacaccatcgccgccagagtctcgatttttacctcctgtgcaatatgggcgttaagatagtcgcagatggcgttaatccgtgggtcgtgggcatggcggttgctaatgggctgctgctgaaaacagcggagaattaatctctccagcgcgttcattgccagcgcttctgacagcggtacggacgcagagtggtggcgtatcacttcgtagaacagatcgcgcagttgctggagctggtcgggatcgttaatggttgttttgccgataccgtgggtggtttggtcccacttcagccagtctatccagtaggggcgggggataaagtagatccacagatggtcccagtactcgctgtgttcgtccctgccgtaatgatggggcacgccgggaggaaacagcaacagatcgttttcccggcacagcaggaagccatcgcccgctttcgcccgcgcctggccgcgcagggtcagattaatgatgtaacctttcatcccctgcgggcgattaatgtagtagtccagcgtggagccgcgggtaatcggcgtgaagcctgcgacgacccaggcattgaaggtaaaggtcttcatcaatggcgagaaattgagtagctcattgatatccagttccattctctcttccacctgagcgccgccgcgtcgttagctttcgatgatagtaaattcccaggccctgaggcgcaacggctggccgacgtatactgtctccccgctcagcagcgcggtacccagggtctcgctgacaacatccatcgcctcgccggagtaattgaacaggaagtggatattatttccggcgcggttacgcatctttttaactactaacggatagcgataggcggaagttcgcgagttcagcgtgagatccgccgtcaggacatcaaacagctggctaatcaggcccttctgcggcagaaagccaacgtacagggcgcgaccctgaccgtaatccgcctccgttgcggcggcgtattcgccccatgccgggtgctgatagcgcagcagggtgcgggtcccgtcatcgggcgtcagtaattccatccacagctcagcctgattgtcattgcggcaatcaatctctgcgcagcaagagcgtactgttgtcccttccggcagggtgaactggctgtagctgacgccgcagctctggcgcaaaatccccggctgcgcgctgctgcgcaccttgacgttttcatcgctaaagcctgatttaaagccgatcagcgctctgccgccccgggcgatatagtcgttaatccgcgttagctggccatcatcggcggcgtacagaccaggaacgatcagcacccggtagcgcgaagtttcctcgttcacatcgtggatgatgtcgaggctgatattgtggtcataaagcgcatcgtggaagcggcggaagatatcgttataaatgttgccctcggcatcgccgggacggaagtgattgagggcgtccattgcctcattacttattagcaacgcgacgtcattttcggccttcagctccgccagctgcggcgacaggcgagcgaaatcggcgccgatagtggtggcttcctgccaggttggattgcgcgagaagtcgtggctgagcagccccttccagtaggtttcaaaggcgttatgaatcgaatgccagtgccagtaggagaccatggcggcgccggaggcgatatggctgaatgcctgcaggcgtagctggcctgggaagggggtccactgggcgaagccctgagcctgggtttccagcacgaagtagttctggcccggcttaagcgagcgggagatagcgccgccaaaggcgatttcccgtccggtcaggtgtgcctgactcgggtgatagatatcgacgccggcgatatccagcgcctgcgccgccgcaaaatggtcgacccgcggctgcacgccgtaagagtaaccgcgccattcgaaatcgaagttgtgggtgacgaactggtgcggctgggcgtattcccgaacgatggccgcctgccaggccagatactcggtgacctgctgacgctgatagcgggagaaggcgcaggcgaggctggcgttgatggtgttttccaccggcggaaaatcctgccagcggtcaatgcggttgctccagtaatccaggccgaaatcgtgattcagctgccggaggtcaggatatttctcctgcaggctgcgcacgaagccctcctgcatatagcggccaatattgtcgtaatgcttggtttcgttatccagttgccagccgataatcgccggatggtgttgcacatgggccatcagcgtgcggataattttttcggcatagcggcgaaaggtcgggttgacgatatccatgatctgccgcggaccatatttttgctgccccgcgacggtggtgaccagaatatcgggatgtttcgccgccagccaggccgggaccgcgtaggtgggcgtccccacgataaccgcaatgccggcctcatgcatagcctccagcacccggtcgatatggtagaaattatactggccctcttcaggctccagcgtactccaggtggactcggcaatacgcaccacgttaatgccggtttcgcgcattaaggcgatatccttagccagccgatcttccggcatatattcatcgtaatacgccacgccataaaataaatgagacatacacactacctcctgacattaattcgcgggcaccggttgtgaagagaagacacgcgctttatccagcgtaataaaagaaataagcgtgaagcacagagcgataccgccgagtacgatatagctactggtaaagcccatgctctggtacatatggccgataccggtcgagagaaaaatagagctaaagcttttcgaaaattggaagccaattaagtaaacggtcgctgacagcagaggattaaagttagccgtaatatattttaacgccgcgacaagtagcaccgagctttcaaaaccgtggaggagtttaatcagactgatggagacggggccaatagcccacgcggagccgataatacgcaagctcataatcagcccgcagtataacagcgcatttttcgggccgattttattcacaaaccatggcgcaaagaacatcacgatggcatcaaggaaaatctgacccgtggttaaataaccgaagacttctgcaccccgggctttactctcaaaaaaatggctgtagtagatagcgaactgctggtcataggtttcatagaccgccccgacgccaatgacatagagggcgaagaaccagaattttttaatttttaacagcgagacggcatcgcggagggtaaccggcgaggctttgccagacagcaatccctgctgcgggtgggcgctgatctgcattttccagacaatgaccagcaggcagacgcctgcgccgctggccaaccagaaaatcatattctgatcaatgccgtagagttttcctgccgcaaaggtaccgatcgcagcgccgatgccgccgaacatccgcgcccgaccaaattcgaagccggaggcgcggctgactttatcaatgtaggcttcgcaaatcccgcagccggcgccgtaggccatgccaatataaaggccgccagccagcgcgccgaggaacacatttatttttaacaggggagcaaagacataaatccagtaaggggcgaataacgtgataataatcgccagcatccacatcagattcttacgatacaccagtttatcggagatgaagccgaataatggctgaacgcagacggcgacaatggcggtgaaagaataaaccataccgacgtctgtgtagttaataccgatggtttccgtcaaccacagggataaataagggtagcagcatccccaacctataaagaagaacaggaaaaacagacagctgataaagtaatttttatttgacgttatcatggtaaccctcgcttcctttattcaggaatatgatcgtgttgatgcgagcaacgttacctttttgcgcgtcggggagtcatgaacgtttcgctatcgagcaggagtaatctgctatcggcagaggggcgtgagccgcttcacattcgagccataaaaaagggcggatggtcatccgcccttaggagagagaaaagattacgctcaggcgttctggctttccgccgtttccgcctgcttcggcaccagcaccgttggcttgttatcgatgcgggtcaccagcagctggtcgatacggtagttatcgatatccacgacctcaaacttatagccggagaacttcaccgcgtcggtgcgtttggggattttacgcagcataaacatcataaagccgccgatggtctcgtaattcccggactgcgggaactcgtcgatatccagcacgcgcatcacgtcatcaatcggcgtaccgccatcgatcagccacgagttttcatcgcgggcgacgatctgctcttccagcccctggccgacgaggtcgcccatcagggtggtcatcacgtcgttgagagtgatgatcccgaccaccagcgcgtattcattcatgatcaccgcgaagtcttccccggcggttttgaagctttccagcgcttccgacagggtcagggtgtccggcacgatcaacgtgttgcggatctgtacgccgccggtcagcaccaggctctggttcgccagcacgcggttcagcagatcttttgaatcgacgtaaccgataatgtggtcgatatcttcattacagacgaggaacttcgagtgcggatgttcggccactttattcttcaggctctgctcgtcttcgtgcaaatcaaaccaaatgacgctttcacgcggggtcatggaggaaggaacggtgcgggactccagctcgaacacgttctcaattagctcatgctcctgcttgcgcagcaccccggccagcgcgccggcctcgaccacggcatagatatcatcggaagtgatatcgtctttccgcaccatcggcagtttgaagatgcggaagatcatgttggccatgccgttaaacaaccacaccagcgggcggaagactaacaggcagaagcgcatcgggttgatgatgcgcagggccactgtttcgggcgcaatcataccgatgcgtttcggagtcaggtcagcaaacaggatgaacaagctggtgaccagggtaaaagagatgatgaagctcagctgctcggagagctccggcgacaaatacccgctgagcaggctatgaaacgccggtgagaaagccgcgtcgcccacaataccgccaagaatggcgacggcgttgaggccaatctgcacgacggtaaagaaggtgcccgggttctcctgcatcttcagcacccgctgtgcgttgacgttgccttcatcggccagcagtttcagtttgattttacgtgaggctgccagtgaaatttccgatatcgaaaaaaacgcactgacggctatcagacagagtattactaaaatactgtttaacatatcttttctgaccgttgaggccagatcctcggaagggaagttgataactcaaatgtggaatacataaaaaaccggtccgaaggcgctggaccggctgtcacactggctagtatagcgtaagggaatgtaaagccgccagagcgttcattgaccgcctcgctgttgaggcggaaatcagaattacgcctgaggcggcaggcagacgccaatgccgccgatgccgcaatagccgtgcgggtttttatacagatactgctggtgatcgtcctcggcatagtagaacggtttggcggtggcgatctcggtggtgatgtgacgggtatcgtgcgcgtcgttcatcgccgcctggaagcgcgcgaggctggcctttgccgcctccgtctgttccggggtcagcgggtaaatcgccgagcggtactgggtgccgtggtcgttaccctgtcgcataccctgcgccgggtcgtgattttcccagaacacctgcaataactgctcatagctaatcacctgcggatcataaaccacgcgtaccgcttccgcgtgaccggtctggccgctgcacacttcgcgataggtcggattgggcgtatagccgccagtgtaacctgcggcggtgctgtaaacccccggcaattgccagaacaggcgctcaactccccagaagcagcccatggcgaacagcgccacttccatccccgccgggacgttggtcatcgagtggccgttaactgcgtggagcgtcgccactggcatgggggtattgcgtccaggcagcgcatccgcctgggcgacaagatgcgttttatcaaatagactcacggttggcctctcaatacagaaatcgtcgttaaggttgtaacgaagcgtgtcttttaacacaataaatacgcgtaatacgtctagattaatacataagaattatttgggttattgccactttttcaaccctatgttgttagggttttgttaagccgtggagcggcgccagtgtttcctgtagaggaaacagggatattcaggagaaaatgtgctaaaaatccgccagttatgtgtcaccagccttttgctggtcagcggggtcgccagcgcagcgaatgtgcgtttgcaggttgagggattatccggggagctggagaaaaacgttcgcgcccagctttccaccatccagagcgatgaagtcacgccggatcgtcgctttcgcgcgcgcgtcgatgacgccattcgcgaaggtctgaaagcgctgggttattacgagccgacgattgaatttgatttgcgtccgccgccgaaaaggggacgtcaggtgctgatcgccaaagtgaccccgggagaaccggtgcgcattggcggaaccgaggtgattctgcgcggcggcgcccgcaccgatagcgactacctggcgctgctgaaaacgcgcccggccatcgggacggtgctcaaccacggggattacgacggcttcaagagctcgctgacccgcgtcgccctgcgcaaaggctactttgacagcgagtttcttaagagccagctcggggtctccctcgaccgtcatcaggcgttctgggatatcgattacgacagcggcgaacgctatcgctttggccacgtcactttctctggctcgcaaatccgcgatgaatacctgcaaaacctcgtgccgtttaaagagggcgactactacacctcgcaggacctggccgagctaaaccgccgcctggcggcgaccggctggttcagttcggtggtggtggcgcctgattttgctaagtcgcggaaaaccaaggtgctgcctctgcagggcgttgtctcgcctcgcaaagagaacaccgtggaaaccggggtcggctattccacagacgtcggtccgcgggtgaaagccacgtggaaaaaaccatgggtcaactcgtatggccacagcctgacctccagcgtcagcctctccgccccggagcagcagttcgactttacctataaagtcccactgctgaagagccccctcgaacagtattatctgatgcagggcggttttaagcgtaccgacctcaatgatacccaggccgactctaccaccctgggggtctcgcgtttctgggagatgtcgagcggctggcagcgagcgattaacctgcgctggagcctggatcactttacccaggcgaacgtcaccaacaccaccatgctgatttatcctggggtctcggtgaaccgcactcgctcccgcggcggcctgatgcctacctggggcgattcccagcgctactcggtggattactccaacaccatgtggggctcggacatcaacttcatcgtgatgcaggcccaggacgtctggatccgtaccctctatgaccgccaccgctttgtggtgcgcggcaaccttggctggatcgaagcggacaactttgacaaggtgccgccagatctgcgttttttcgccgggggcgatcgcagtattcgcggctataaatacaaatctatctcgccgaaggatgatgacggcaagctgatcggggcctcgaagctggcgaccggctcgctggagtatcagtacaacgtcagtggtaaatggtggggcgccgtgtttgtcgatagcggcgaagcggtcagcgatattcgcgagagcgatttcaaaaccggcgccggggtaggcgtgcgctggcagtcgccggtggggccgatcaagctggatatcgcccggccgatcggcgacaaagaagagcatggtttacagttttacatcggtctggggcctgaattatgagtttatggaagaagataagcctcggcgtcttaatcgtgttggtgctcctgctgggcaccgtcgggttcctggtggggaccaccaccggcttgcatctggtgttcaaagcggcggatcgctgggtaccggggctggaaatcggcaaagtgaccggtggctggcgtgatttaaccctcgataatgttcgctacgaacagcccggcgtggcggtgaccgccggtcagtttcacctcagcgtcaggttgcgctgcctgtgggacagcagcctgtgcgtaaacgacatcgcgctgcgcgatatttacgtcgccgtcgataccaagaagatgccgccctcagcgccggtcgaggaagaggacagcgggccgctgaatctctccactccttatccgatcaccctcagccgcgtcgcgctgcataacgtcaacgttaaaatcgatgataccgcggtctccgtacgcgacttttccaccggcctgaactggcaggagaaaaatctgaccctgacgccgacctcgctgcaggggctgctgatcgccctgcctaaggtggcgaaagtggcgcaggagcaggtggttgagccgaaaattgacaacccgcagccgcaggaaaaaccgctcggcgagacgatgaccgacctcttctcgcagccggtgctgccggcgatgaccgatgtccatctgccgctgaacctcaatattcaggcgttccgcggcgagcagctgcgcctgaccggcgataccgatatcaccgtgtataacctgctgctgaaagtcagcagtatcgacggccagatgaagctcgacgcccttgatatcgactccgatcagggcaaggttagcgcctcgggcagcgcgcagctgcaggataactggccggtggacattaccctcgccggaaccctgaacgtcgacccaatgaaaggggagaaggtgcagctgaaggtgggcggcgaagtgcgtaaaacgctcaaagtcggagtggacttaagcgggccggtcgcggccacgctgcgcgcggatgcgcagctggcggaggtagggctgccgctcaatatggagctgaagagtaagcagctcgcctggccgttcagcggcgagaagcagtttcaggccgacaatgtccagctgaagttcagcggcaaaatgaccgactatgcgctggccttctccaccgcggtgaaaggtcaatcgctgcctccggcgaaaatcgccctcaacgccaaaggcaatgaacggcagatcaatctcgacaagctgacggtcaacgccctggaagggaaaaccgagctgaaggcgctgctcgactggcagcaggcgatcagctggcgcggcgagctgaccctcgacggcatcaacaccgccaaagaggtgccggactggccgtcgaagcttaacggccggatcaagacccagggcagcctgtacggcggcagctggcaggtgtcggtgccggagctgaaaattaccggcaacgtgaagcagaacaaagtggatgtggcgggctcgctgcagggtaacagctatctgcagtggaaaatcccgggactgcatctggcgttaggcccgaacagcgctgatatcaaaggcgagctgggggtgaaggatcttaatctcgacgccaccatcgatgcgccgcacctggataatgcgctgccggggctcggcgggacggcgaagggcttggtaaaagtgcgcggcactgtcgatgcgccgcagctgctggccgacatcaccgcccgggcgctgcgctggcaggagctgaccatcgcccaggtcaacgtcaaaggggatgtgaaatccaccgatcagattggcggtaacctggacgtgcgggtggatcgcatcagccagccgggggtcaatatcagcctggtgcagctcaatgccaaaggtacagagaaacagcatgagctgcggctacgcgtgcagggcgatccggtttccggccagctggcgctggcaggcagcttcgatcgtcaggccgaacgctggaagggctcgctgagcgatacccgcttccagacgccggtggggccggtagcgctgacgcgcagcattgcgctggactatcgcaatctggagcagaaaatcagcatcgggccacactgctggaccaacccgaacgccgagctctgcgtgcctgaaaccattgacgcgggcgccagcggacgggcgcgggtgaatctcaaccgcttcgatctggcgatgctcaagccgtttatgccggaggcgacccaggccagcggcgtgtttaccggtaatgccgatgtgagctgggacaccaccaaagagggactgccgcagggcaaagtgaccctcagcgggcgcaacgtcaaggtgacccaggtcgtcaacgacgcgccgttgccggtggcgttcgatacgctgaacctcagcgccgacctgcacaacaatcgcgccgagctgggctggcttatccgcctgaccaacaatggtcaactggatgggcaggtgcaggttaccgacccgcaggggcggcgtaatctcggcggcaatgtcaatatcagcaacttctcgctggcgatgatcaacccgattttcgctcgtggtgaaaaggcagagggaaggctcaacgcccgtctgcgtctgggcggcaatgtgaaaagtccgcagctgttcggccagatgcagctgagcggggtggatatcgacggcaactttatgccgtttgatatgcagccgagccagctggcgatgaacttcaacggcacgcgctcgaccctgcaggggacggtgaacacccgccaggggcaaatcgccctcagcggtaacgccgactggacgcagatcgataactggcgggcgcaaattgcggcgaaaggcagccgggtgcggatcacggtgccgccgatggtgcgtctcgatgtatcgccggatgtggtgtttaccgccacgccaagcctgttcaatctcgacggcaaagtggatgtgccctgggcgcggatcgtggtcaacgaggtgccggagagcgcggtcggtgtctcctctgatgaagtgatgctggataaaaacctcaagccgattaagcagcagagcgccagcatcccgatcaacagcaacctgaccattcacgtcggcaacaacgttcgtctggaagccttcggcctgaaagcgcgtctgaccggtgatttgaaagtggcgcaggacaagcaggggctgggcctcaacgggcagattaatattccggacggccgtttccacgcctatggtcaggacttgattgtccgcaaaggggagctgctgttctccggtccgccggatcagccgttgctgaatatcgaagcgattcgtaacccggatgccaccgaagacgatgtgatcgccggcgttcgcgtcaccggctccgccgatcagccgaaagcggagatcttctctgatccggttatgtcccagcaggaagcgctgtcttatctgctgcgcggccagggtttgagtagtggtcagagcgatagcgccgcgatgacctcaatgcttattggtatgggggttgcacaaagtggtcaggttgtgggtaaaatcggcgagacgtttggcgtaagcaacttggcgttggacaccgaaggggtaggcgattcttcccaggtggtggtcagcggctatgtactgccgggtctgcaggtaaaatacggggtcggtatcttcgattccctggcgacgctgactttacgttatcgcctgatgcctaagctatatgtggaagcggtgtctggcatcgaccaggcgctcgatttgctctatcagtttgagttttagcaatgcgaatatttgtttacggcagtttacgacgcaaacaaggcaacagccactggatgaccaacgcccagtggctgggcgctcatagtgtcgacgattatcagctgtacagcctgggccactatccaggcgcggtgcccggcgaaggcacagtacatggtgaagtttatcgtattgatgcatcgacgctggccgaactggatgcgctgcgcaccaaggggggcgagtatgcgcgccacctgattcagacgccttacggcagcgcatggatgtatgtctatcaacgttccgttgagggttgtacgttgatagcgaacggcaactggttggatcgcgaccagtattaaccacgacagcgccaccttcgggtggcgttgttttttattacttcagttcccatggcgtcattctggcgccctgacgtctggcataacgtaatatggcctgatgtaccttcactctaccggccacccgacgtgacaggggatgggcaatcatacggacaaactccatcactattaacagcaggttaatcgggagcagggtgcctgtcagcctggtaagcatttcacgataaaatggccaactgcccagattaagcatggggtcgtgcagtttgatggtgagcgtaaaaaacatcactatgagtacgaggccgtacgcgattttataaattgatgccatctgctgattgccgggatgaaaggggctattttttaaataaacactgccatcactgacattgtataacgcctgaagatcatcgtatccatgccggcgtgcggcgataacccagtccccatcggcaagaaatggcgggcgacaacgattattcagggcattgctcagccaggtcaagcgcgctgaaaaaaacgagtgacgagtcgccagctgaaaacaggcgccttctttgataaaataaggccttaccctcgtagcgatccatatttgataataactattcagaatcacgccttcttcaagcgcaaattcttttggcagcgctatctcgttgttggccgatggtggatgcctttcagaagtagcgggtagaatttccagacgctgacagaatgaaatatcgccttgcttcgttcgctgcattttcgcattgagaacacgtaacctgagtgagaaattgcaagagcaaaaagagaagatgccgaagggattcaccaacattgtgataaaacataataataaaaaaatatccaaccatggagcacaagcgagaatgatcaagcaaacaaaaaagaccaagccgacaggtcgaagaagctttttaatactcagcggctgccgggaaggttcgagcaaaatgtggccatcgcttaaccagtggatccagtaactgccatcctttaggcggcaagtgccgatatgtagcggctggccgagcctcagacggtcaaaaagcgaggggtctttaaaatggcgtttatcggtataaaaggcatgctcgcctgcaatgaggcgtaaatagctttgctcttccgaggcggcagtggtgaagccggtaaaattcacggtgaaataatgggtctgtttcacaaggttccttccttgatgaaatgatggtgttttacgtatcacgcgttgccgacccactccttaccagagcgggagatgatccttcgccagccacatcgcggaagccaacgtcgtcagcgcgaggaataataatcgtcgtgttggggtgctgaacattacatgatctcctcgagcgcggtatggcgggccgctccctgcaggtagtgccgcatcgccgagcgcatcttcatccagtcagccacccggtgtgacaataaccaggccgtcgggccaatcagctccagtaccgccaggatcccgccgaaactgagtaataatagggacagcatgtccagtgaatcctgaattaaccacccaaatcccctgactggtttgtatgggttatttagcgacatgccgagtatgaggaggtacatcaccagcaccatgccataaaacaggttatagactagcgacatttgccggtcaccgggataacagggatgatttttcagaaaagcgcccccgtcgctgacgttgtataacgcctggacgtcgttatctttccgttggtagacggcgactatccgatcgccgatagcgagaaagggcggttgacggcggtaaaaaaagggatgcaggccgaagttggcgaagccgttctgccagaagaaggccagcggcgccgtgtcgcattgtatcccaacgccatggtattcccgcgttgggttccccgcgaaccacttcttaaaaatgatattgctaatttttcccgtccggacggcatagcgttccggcagggcttgcgtaaaaggcttcgccgactggcggagggtttgcgccgtagtcggtagcggctggcaaaaggaaaagtcgcggcggcgggcctgcgccatcttcgccaacagatcgcgcatggcggggtgcatttttagcgcccggtggaacagtagctcgcagagcccggttaacagtgcgatgaaggccattatcgcgataatgccgaagccgaaccttccccattctgaggtgctcatcatgagcgggataagagcgacgatgagcgtcagcaggctgataatcagcagcggccgggcccagcgctttacccgttgactgggctcaaggagcgtttcgccatcgctgagccagtggatccagtaactgccgttgtccaggcggcggacgccaaggtgcagaggctgattgatcgtcaggcggtcaaaaagcgaggggtcgttaaaatagcgtttatcggtataaaagacatggtcgccggcgataagacgcagatacccctgtttttcacaggcggcggtcgtgaagccagaaaagttaagggtgaaatagcgaacgcttttcacgggacaccctccatggtgttatcgcggctatccgtgccgcaatcaggcaggggatgaccctgcctgagacagaattacttctgcttagcgcgctcgaaagaggcaacgatttcggctttcgccgcttccgcgttgtcccaaccgtcgactttaacccacttgcctttttccagatctttgtagtgctcaaagaaatgagtgatctgggctttcagcagttccggcaggtcgttcacatcgttgatgtgatcgtattctttgctcagcttggtgtgcggtacggcaaccagtttcgcatcttcaccagattcgtcggtcatcttcagaacgccaaccggacggcagcggatcacggagcccggctgcagcgggtacggagtcgggaccagcacgtcaaccgggtcgccgtccagggacagggtgtggttgatgtagccgtagttgcacggatagaacattgccgtggacatgaaacggtcaacgaacagtgcaccgctctctttgtcgacttcgtatttgataggatctgcgttcgccgggatttcgatcacgacgtagatgtcttccggcagatctttgcccgcaggtacgttgagtaagctcatgtctgtttcctttaaaatgtatggcaaacaagtgctcggtattatagccaactcacatcgaaagtcttcgcttctttttcccgatatcgccgcagagtgctccgaatttttcgcgtaataatgacatgaaaatccataaacatagccacatcatgaataaatttatgtaaccgttttcattgcatgtgattgatttatcatactgcttaaaaaaacgtcataaaccgcaacagccgcgctccctgcgaagccttatcggctctccgctgggcagtagggccatcattaacatctcatttacttttttgaagtgtgatgtaacgcattcagttacatcaccgattgtctatagtttgtccgcaggtgagactttaaccaacaataaccctacgaggatacccttatgtggaagcgcttacttcttgtcacagcagtttccgcagctatgtcgtctatggcgatagctgccccgctaaccgtaggtttttcgcaggtcggttctgaatccggctggcgtgcggcggaaaccagcgtcgcgaaagaggaggccgccaagcgcggtatcaccctgaagatcgctgatggtcagcaaaaacaggaaaaccagatcaaagcagtgcgttcctttatcgctcaaggggtcgacgcgatcttcattgcgccggtggtggctaccggctgggaaccggtgctgaaagaggcgaaagaggccaagatcccggttttcctcctcgaccgttccattgatgttaaagataaagatctctacatgaccaccgtgaccgccaacaacgtgctggaaggccagctgattggcgactggctggtgaaaaccgtcgacggtaagccgtgtaacgtcgttgaactgcagggcaccgttggggccagcgtggccatcgatcgtaagaaaggcttcgccgacgcgattgccaaagcgtcgaatatcaaaattatccgctcccagtccggcgacttcacccgcagtaaagggaaagaggtcatggagagctttatcaaagctgagaataacggcaaaaacatctgcatggtgttcgctcataacgacgatatggccatcggcgccatccaggccattaaagaagctggcctgaagccgggcaaagatattctgaccggctccatcgacggcgtgccggatatctataaagcgatgatcgctggtgaagccaacgccagcgtcgaactgacgccaaatatggccggcccggcgtttgatgcgctggagaaatacaaaaaagacggcaccctgccggagaagctgaccattaccaaatcgacgctgtatctgccggatacggcgaaagaagagttagagaagaagaaaaatatgggctactgagtggggagcccctcattccatccctctccccggtgggagagggtaaaaagcagcgttccagaaaccccgggaagcccagcgcgacccggggtaacctgacatcatttgaaggtgacatcgattatgagcgccgaggcacaccaggagatccttcgcaccgaaggacttagtaaattcttccccggcgttaaggcgctggataacgtcaactttagcctgcggcgcggcgaaatcatggccctgttgggcgaaaacggcgccggaaaatcgacgctgatcaaagcgctgaccggcgtttaccatgccgatcgcggcactatctggctggaaggccaggctatttcgcccaaaaataccgcccatgcccagcagctggggatcggcaccgtctaccaggaagtgaacctgctgcccaatatgtcggtggcggataacctgttcatcggccgtgagccgcggcggtttggtctgctgcgacgtaaagagatggaggccagggcgacggcgctgatggcctcctacggcttttccctcgacgtgcgcgagccgctgaaccgcttttcggtggcgatgcagcagatcgtcgctatctgtcgggccatcgacctgtcggccaaggtgctgatcctcgacgagcccaccgccagcctcgatacccaggaggtggagatgctgttcaccctgatgcgccagctcagggataacggcgtcagcctgatcttcgtcacccattttctcgaccaggtctatgcggtcagcgaccgcatcaccgtgctgcgtaacggcacatttgtgggctgccgtgagacccgcgagctgccgcagattgagctggtgaaaatgatgctgggtcgcgaactggaccacaatgccctgcagcgggcgggccgtaccctgctgagcgataaaccggtagcggcgtttgaaggctacggtaaaaaaggaaccatcgccccattcgacctgcaggtccgcccgggcgaaattgtaggcctcgccggcctgctgggttccggacgcacggaaaccgccgaggtgatcttcggcattaaaacggcggacagcgggaaggcgtggatcaaaggcaaaccgcagaccttgcgctccccgcatcaggcgtcctgcctcgggatcggcttctgtccggaggatcgcaaaaccgacggcattatcgccgctgcctcggtgcgggaaaatatcgttctcgccctgcaggcgcagcgcggctggctgcggccgatcccccgccgggagcagaatgagatcgccgagcgctttattcgccagctggggatccgtaccccgagtgccgagcagccgatcgagtttctctccggcggcaaccagcagaaggtgctgctctcccgctggctgctgaccaaaccgcagttcctgatcctcgatgagccgacccgcggcatcgacgtcggcgcccatgcggaaattattcgcctgattgaaaccctctgcgccgatggcctggcgctgctggttatctcttctgaactggaggagctggtgggttacgccgatcgggtcattatcctgcgcgatcgccgacaagtggcggagatcccgctcgccgagctctctgttccggcgatcatgaacgctattgcggcataaggagtaacccatgatgcctcgatctctttcgcaaaccggcccggagaagcgacgcttcacctggccgaagggcaccccgcagattattgccctgctgctggttctgctggtagacagcctggtggcgccccatttttatcaggtggtgctccaggatggccgcctgtttggcagcccgatcgatattctcaaccgcgccgcgccggtggcgctgctggcgattggcatgacgctggtgatcgccaccggcggcatcgacctgtcggtaggggcggtgatggcgattgccggcgcgacggccgcctcgatgaccgtcgccgggcacagcctgccggtggtgctgttggccgcgctggccgcgggcgcgctggccggattgtggaacggcatcctcgtggcggtccttaagatccagccctttgtggcgacgctgatcctgatggtggccgggcgcggggtggcgcagttgatcaccgccgggcagatcgtcacctttgattccccggccctggcgtggctcggcagcggatcgtttctgctgtttccgacgccggtgatcgtcgccgccgctacgctgctgctgttctggctgtttacccgtaaaacggcgctgggcatgtttattgaggcggtagggatcaacatccgcgcggcgaaaaacgccggcgtcaatacccgcatcgtggtgatgctggcctatgtcctgagcggcgtctgcgcggcgatcgccgggatcatcgtggcggcggacatccgcggcgcggatgccaataacgccgggctatggcttgagctggacgccattctggcggtggtcatcggcggcgcctcgctgatgggcgggcgctttaacctgctgctctcggtggtgggggcgctgattatccagggaatgaacaccgggattttgctctccggcttcccgccggagctcaaccaggtggtgaaagcggtggtggtgctgtgcgtactgattgtccagtcgccgcgctttatcggtttactgaaaggggtacgcggccatgataaaacgtaatttaccattgatgatcacccttgcggtgtttgtgctgggctacctctactgcctgacccagttccccggttttgcctcaacgcgggtgatctgcaatatcctgacggataacgccttcctcgggatcatcgccgtgggcatgacctttgtgatcctctccggcgggatcgatctgtcggtggggtcggtgatcgcctttaccggcgtcttcctcgccaaagcgattggcttttggggaatctcgccgctggtggcctttccgctggtgctggtgatgggctgcgccttcggcgcgtttatggggctgctgattgacgccctgaagatcccggcctttatcatcaccctcgccggcatgttcttcctgcgcggcgtgagctatctggtgtcagaggagtcgattccgattaaccatccggtgtacgacaccctgtccgggctggcatggaccattcctggcggcggtcgtctcagcgccatgggactgctgatgctgctggtggtggtggccggtatttttgtcgcccatcgcacccgctttggcaaccaggtgtatgccatcggcggcaacgccatgtcggcgaatctgatggggatttcgactcgcagcgccacgatccgtatctatatgctctccaccggactggcgacgctggctgggatcgtcttttccatttatacccaggcgggctatgcgctggcgggcgtcggcgtcgagctggatgcgattgcctcggtggtgatcggcggtacgctgctcagcggtggcgtcggtaccgtgctgggaacgctgttcggggtggcgatccaggggctgattcagacctacatcaacttcgacggcaccctcagctcatggtggacgaaaatcgccatcggcattttgctgtttatctttatcgcgctgcagcgtgggctgaccgtgctgtgggaaaatcggcagaatgcggcggtgacgcgggtgagcggggcggggagtcgctaagaaatgctcctcccgcaggcgcgggaggagcgggcagggcgcttaggcgtccgggaacgctttaataaagttctcgacgtcttctaccatgtggttgttgccgacgaagaaggagcgacgctgatgcaggctttccgggataatatccagaatacgctctttaccgtcgctggccttaccgcccgcctgttcggcgaggaaggccatcgggttgcattcatacagcaggcgcagcttgccttccgggtggctggcggtgctcggatagagatagatgccgcctttcagcaggttgcggtggaagtccgccaccagcgagccgatatagcgtgaggtataaggacgctgagtcgctttgtcctcttcctgacagtacttaatgtacttcttcacgccctgcgggaatttgatgtagttgccttcgttgatggagtaggtattgcccttctccgggaagcgcatgcgctcctggcatagacagaagacgccaagggacgggtcgtaggtgaaggcgtgaacgccgcagccggtggtatacaccagcatcgtcgacgatccgtagaccacatagcccgcggccacctgcttgttgcccggctgcaggaagtcttcttctgtcaccggcgtgccgacaggcgtcacgcgacggtagatagagaagatcgtaccgacagagacgttaacgtcgatgttagaggagccatccagagggtccatcagcaccacgtatttggcgtgttcacacccttcgaagacgacaatctcatcttcttcttcagaggcgatcccggcaacaatatcgcgtgctcgtagtgcggcttttaatttttcattagcgaacagatcgagtttttgctgaacctcgccctgaacgttttcagcaccgctggcacccaggatatcgaccagaccggccttgttgatatcgcggtggatgatcttggcgcccaactttattgctgacaacaaagcagtcagctcaccggtggcgtgggagaactcgtgctgcttttcaacaataaactcacctaacgttttcataactcgttccctgcatttttatgttgagtaaaacgaacgcaacaatcttaacaaagaatcaaaaaagtgcgcacaggtgaatcgcgccagcaaaatacagattcgcctgaaatgcatttcgccagggcccgggatatgggtaaaatgtgccccggataagaaaaggaaatgacgaatgcgcattcatattttaggaatctgtggcacgtttatgggggggctggccatgctggcgcgctccctcggtcatgaggtaacggggtcggatgctaacgtctatccgccgatgagcaccctgctggaaaaccaggggattgatttaattcagggctatgaccccagccagctggagccccggccggacctggtgatcatcggtaacgccatgactcgcggcaacccgtgcgttgaagcggtgctggaaaataatattccctatatgtccggcccgcagtggctgcacgacttcgtgctgcgcgatcgctgggtgctggccgtcgccgggacccacggcaaaaccaccactgccggcatggcgacctggatccttgaagcctgcggctataaaccggggttcgtgattggcggcgttccgggcaatttcgacgtctccgcgcgcctgggcgacagcccgttcttcgtcattgaagccgacgaatatgactgcgccttcttcgacaagcgctccaagtttgttcactactgcccgcggacgctgatcctcaacaaccttgagttcgaccacgcggacatctttgatgacctgaaggcgattcagaaacaattccaccatctggtgcgcatcgtgccgggcaaaggcaaaattatcctgccggagaacgacatcaacctgaagcaggtgatggcgatgggctgctggagcgagcaggagctggtgggcgagcagggccactggcaggcgaaaaaactgaacgccgacgcctcgcagtgggaagtcttactcgacggcgaaaaggtcggcgaagtgaagtgggcgctggtcggcgagcataatatgcataacggcctgatggcgattgccgcggcgcgtcacgtcggcgtgctgccggcggatgccgcgaacgcgctgggcagctttatcaacgcccgccgtcgcctggagctgcgcggcgaagccaacggcgtcaccgtgtatgatgatttcgcccatcatccaacggcaatcctcgccacgctgcaggcgctgcgcggtaaagtaggcggtaccgcgcgcattctcgccgtgctggagccgcgctctaacaccatgaaaatgggcgtctgcaaggacgatctggcgccgtctctcggccgcgccgatgaagtgttcctcctgcagccgcagcatattccgtggcaggtggcggaagtggcggaagcctgcgtccagccggcccactggagcgccgacgtcgataccctggcggagatggtggtcaaaaccgcccacccgggcgaccatatcctggtgatgagcaacggcggcttcggcggcattcatcagaagctgctggataagctggcgcaaaaagcggccgcggctgaataagcgcgtacgcctccggtcactgccctccgcgtgagggcagttttgttttagctaccaggaattgtgtgatgctgacctgcgaaagcgtacgttctaccgactcgccccatttcgccatgctggacgcgctttacgcgcgcgcctttccgtggcacgagcagcgcgaaagcgaggccaaacgtcaggcgctgagccacccgcgctacgcgctggaagcatggttcgatgaaggcgtctttgtcggcctcagcggctgctggcagtttgccggctacggttatatcgaacatctggcgatcgacgacacgctgcgctcccgcggctatggtaaacagctgctggcgcagatcctgacgcgcgccccgctgaccattctggaaatcgatccgctaaccacggccatcgcccataaacggctgcgcttttatcagtcgatggggttccatgctaatccctgggcgcatcgtcatccgacctatcatcagggcattgcggatcatgagctgctggtgctgagctatccacagccgatcggtgagcggcagtatcagcagtttgcccgggatctcgggcacgaggtgatggggcgggagtagcccggctcggcgtaccgctccgggcattcgactggcggcgctgttactctttggcgatcggcgtctcgttctccgcgactttgttatcgccctgaatctgcgcgattttctgctcaacggcggctacctgggcgctgtcgtgcagcagggtgtaggttagatcaaactgcgcgctggcgcccggctgcagctgcttcacgcgtttttgctcgcgttcaatggtcaccggataggcgtagctggtccccggctcgataccggtgacatagccctgcttgacggtatcggtgtttttccacagcgtcaggaccggcagctgacgggtatcaaactgaatagaggcccctttatcgcccgctttgttgaccaccgcggccagggtctggtgattttcatcggccagcggctgaatattaaataccatctcgtcaaaatctttggtcggtccctgataggtctgccaggtttttaacccgctcttcgcgtaatcattgaacgggctgatgctggacatcggggcgaggaagcgcgcgccttcttcgaggatcggggtgccgaagttgctgtggtagatgatctgataatcatgcggatagtcggcatggttggttaagacgtcatgtaagctgaagctgttgctgcccggcacgtagcgcagttcggtcagggtctgcagatcggcttttttaaaggtgctttctttcaccagcccgcggatgcggatttcatacggcgcgctgtcggccacctccacctccaccagagaggccggcgtgttgcccgccttgccgtgtagggtataaatttgcccgtccgcggtcaccggatggccggtccattcatagccgcagcggaccatcatctcgttgaatccttccagccagccgaggccattgcggctttccaggttgataaacgccgggttgacgacctctttaaccggcgaatcccagcccatccggctgccgaaaccctcaatacgcagcaagttcatgccgcgtgtcggactcagggtgatggtcaggccgtctttactatgaatggtgaggattttgctgccttcctgcttaccgccgtgcaggactttctgctcaatgctgaacgcatgatctttcaccttcagctgatcgctgttgatctgccagtttcctttatccatcccctcttcagcgttcgtcagcacccatgtttttgccgcggccgagccggaaaccagcagggcgatcgtcgtcagaaccaatgtctttttcatttttattccctttttgctgaatcgattgtgtcattgacgtgtgaaatctaccggcatgggggtgattaaaatgtgaagcgcctcacctggtgagaaaacggccgatttgctgagactaaacgggatggaagtcgtattatcttgctatgtaatacgtatttatcaccagaatatgtgatctatattgtttttagctttaacgattcagcttggcagtaaggcaataaacaaacgtatcgtcgtgtggatgaggggactcaggcgatgcgacgggaatccccctgctggcgcaagccttagagctggggtgaaggtaggccggataaggcgttagccgccatccggcataacgacgggaacggagtctggtatagcttgcccggcggcgctgcgcttgcgcgggcctacggtgttgagtaaccgtttgatatacagggctccgtaggccggataaggcgttagccgccatccggcacaacgacgggaacggagttcggtacagcttgcccggcggcgctgcgcttgcgcgggcctacggtgttgagtaaccgtttgatatagggaaccgtagcccggataaggcgcagcgcgccgccatccgggagactattgcgggcaaaaacagcgggacttagccttcgttttccgccagttcacgcagatactggaagatcaggcgcgccgatttcggcggcttgttgccttctttctctttcttcgcattgcggatcagcgaacgcagctgctgacggtcagcatctggccacaggttcagcacttcagcgacggcgtcatccccgtcgtcaatcagtcgatcgcggatctgctccagcttgtggaacagcgcaacctgctggttgtgacggtttttcagcttgtccagcgcctgacgaatcggatcgacatcgcggttgcgcagcatcttaccgataagctgcagctggcggcggcgaccctcttttttgattcgctgggcgagttcgatggcgtcgcgcaggtcggtatccagcggaattttatccagcgcgtttttccccaggtcaacgagttccgcgccaagacgcttcagttcttccgcgtcgcgcttaatttcactcttactgacccagatgatttcatcatcttcatcttcaacgttatcaccgggcacgtcgtcgagccagtcttcgggctgctttgtcatctcaggctccttaaaaaaagaggctaatgttaccagttaaggcgcgcactgaaaaacggttctctgttagacttcagttaactccttcttacattatggcattagcaatgaaagtcatctctcaagttgcacagcagcgtaagacgctggaagaagccgttaccacggcactggaactggcggcaggtaaatctgacggtgcggaagtttccgtcagcaaaaccacgggcatcggcgtcagcacccgctatggcgaagtggagaatgtagaattcaacagcgatggggcattaggcatcacggtttaccatcagaaccgcaagggcagtgcctcctccaccgatcttagcccggaggctatcgcccgcaccgtgcaggcggcgctggatatcgctcgctatacctccccggacccgtttgccggcgtagccgataaagatctgctggcctttgacgccccggatctggacctgttccacccggcggaggtctccccggacgacgccatcgaactggccgcccgcgcggagcaagcggccctgaaggccgataaacgcatcaccaacaccgaaggcggcagctttaacagccactacggcatcaaagtgttcggcaacagtcacggcatgctgcaaagttactgctcgactcgccattccctctccagctgcgtcattgcggaagatgacggcgatatggagcgcgactacgcctacaccattggccgggcaatcgaggatctgcagtccccggaatgggtcggggaagagtgcgcccgccgcaccctgtcgcgcctggcgccgcgtaagctgtcgaccatgaaggcgccggtcattttcgccaacgaagtggcgaccgggttgtttggtcacctggtcggagcgattgccggcggcgcggtctaccgtaaatcgaccttcctgctcgattcgctgggcaaacaaattttgccggagtggctaaccattgaagagcatccgcacctgctgaaagggctggcctccacgccgttcgacagcgaaggcgtgcgcaccgaacgtcgcgatatcgtcaaagacggcgtgctgacccagtggctgctgaccaattactcagcgcgcaagctggggatgaaaagcaccggccacgccgggggcatccacaactggcgcattaacggccgcggcctgagttttgcaaagatgcttaaagagatgggcaccggtcttgtggttaccgaactgatggggcagggtgtcagtggcgtcaccggcgactactcacgcggcgcatccggcttctgggtagaaaacggcgaaattcaatatcctgtcagtgagatcaccattgcaggaaatctgaaagaaatgtggcgtaatatcgtgaccattggcgatgatattgaaacgcgcagcaacattcagtgcggttctgtgctgctgccggagatgaaaatcgccgggcaataacacctgtttgcttaaataataaaaaggaagtgagcaatgcgtaaaaaactgttagcgatgctggctgtctctgcttttgcgctcggttcagcgtcggccttcgccgacctgggcgaagacatggacactctggcagaaaacctgcaagtggtacagaagacctccgacgccggcgagctgaaagcggcgctgaataagatgcgtaccgccgcggtcgatgctcagaaagagaccccgccgaagctggaaggcaaagcggccgacagcgctgagatgaaagattaccgtcacggtctggatattctgatcggccagatcgacggtgcgctgaagctggcgaacgaaggcaaggtgaaagaggcgcaggccgccgcggaggagtttaaaaccacccgcaacacctatcataagaagtaccgctaaccgttcttttcgggaggcatcagccgatgcctcccacctgaaagcctaccgatatcacatttttccactctctttttccggcctttccgctgccgcgggcgccttgtccacgctcattgttgtgatacatctcacgccatagccgtcgtttttaccttttccctgtgaatatgtggggtcgatcacccctgccgcctccctttccacttcgaagtggaaaacaactcgctacaaactcctgacccccggcgctactttggattccagagacatcagcggggtaacacaagtgaataacggagcggtaataaacgacgtaggggagcaggcggcgcagaccgaacgcctggctgacaagatgttacagcaggtattcgccctgttaagccgtcacgacatcgtccctaacgacgttcaggagcaaatgctgacttcccacgtgcgggcgatggcccaccggtcaatcagcggcgaaccgctaccggaagtggatgccagtctgttcgaagaaatttctgaagattcaatgatgctggcccgcgaagtggtcgcacagttcggcaacctgcctgatgaagaggcctggctgctctccgtccacttcgaagtcgcgaaagataacctgtaaggagcaaaacatggaacaaatcactgtagtcattggcgaccgtctgggtaaaggccaaaaagtcgccgcaggcgctgaaaaagcgggcgcacgtgctgtggtcgtccctggcgttgcggccgacatgaagcttggcgacataatgaaagcggaaaacgccaccttcggcatctccttctgcggcagcggcggcgccggcgccatcaccgcccagaccaaatacggctacaaagcaaaatacggtatgcgctctattgatgagggcgtcaccgctatcaacgaaggctgcaacgtgctgggcttcggctttatggataaagaagagctgggcgagcggctggtagaagcctggaaaaagaaatacggcgcataagtatgaaagagcaattcaccaccacggtgagggttgccggcaaaggcgaaagcaaatcacgggccttcgccgatgccctgaaccatgtgcaggctgcggtgatgaaatcatcctcgcgcatcctactgcgtattgagccacaggacgtgacggttgttcatgcgcgcgaagcggtacgaaaagaggcgtttctgttcttctttttgcgccgtgaacgacggacctacagcgtggagctggacgtcaccgtcaacgtgaccgccatcgatctcgataaagtggatttcgtcacgcaaacctgattgttagcataaggtctgactatgttcctgataattttaataaaatcgcttatcatcggcggcctggtcggcgtcggcgtgggcgccggagcggcacgcatgtttcatgcccccaccacgcaggggatgggggcgtttcgaaccctgggcgagctgaattcctgtgagggcgatccggcctcccacttctcctttggccttggcttcttctttaacgcctgggcctcttccgttgcagcaggctccttcacccaggatgttgaccaccgcattatacccaactggggcgcggcggcgctgatgctgaaaaatcgtaacgtcggcgaaacgctgcacgatccgaaaaaaatggccatctcctgcggcatcatcggcatgattgtcgtcgccttcctcaacctgaccgcctcgtccgtaccggaagcgctgcaggtgaccgccgttaaggtactggtgccggcggcaaacctgctggtaaacaccgtgatgccggtgatcttctggctggcggcgatcgatgccggtaaaaaatcaggcttctgggcgacgattttcggcggcgccgcgcagctgattatgggtaacgccgtaccgggtctggtgctggggatcctgatcggtaaaggcgtcgaagagagcggctggaaccgggtgactaaagtgatgatggtggccatcgtcgcgctgtttgtcctcagcggcttcttccgtggcttcgacatgaagatgatcgaatccttccatctgaccgtgccgaactggctggacatgatccacaactcactcagcggcaagtaacgggagccggataatggaacagaataaaggtttttggtattccgactggtcgttcccgatctttgttggcctgctctcctccggcgtcttcgccgggacccacatgtactacctgtacggcatcggcgcctttaacgaagtagccttcgtggcgatgctgaagtcggggattgataccggcgtttacggcgcggtggcggcgtttggcgctagcttcctgttcgcccgcatcatcgaagggtcgctggtagggatcctcgatatcggcggcgcgatacagaccggtatcggtcttggcgtgccggcgctgctgctcggcgcgggctttgtcttcccggtggcgaacttcgccgcgtcgctggtcaccggcctggtcctcggcctggcggtgggctacatcatcattctggcgcgtaagttcaccatcaaccagagcgattccacctacggcgccgacgtgatgatgggggccggtaacgcctccggccgcttcctcggtcccttgatcatcctcagcgcaatgaccgcctcgattcctatcgggattggctcgctggttggcgcactgctgttctacatctggcagaaaccgatcaccggcggcgccatcctcggggcgatgatcctcggttccatcttcccggtggcgattagctaagcgcccgatggtgctgcgcttatcgggcctacaagccagcgcggtttgtaggccggataaggcggtacgccgccatccgtacactcttttcatcaggagatagctatgtttgatttactcctgcgccgcgcgcgcctcgtcgacgataccctgactgatatcgccattcaggacgggaaaatcgcggcgctgggcgagattagcgcgccctcccgtaaaaccattgagctgaacggcaaggcttacgtcagcgctggctggattgactctcacgttcactgctacccgaattcaccgatttatcacgatgagccggatagcgtcggcatcgccaccggcgtcaccaccgtgatcgatgccggcagcaccggcgccgacgacgtcgatgacttctatcaactgacccgtaaagcggcgacggaagtttatgcgctgctcaacatctcccgcgtcgggctgattgcgcagaatgagctggccaatatggccaatatcgacgccgccgcggtgaagcaggcggtgcagcgtcatcccgactttatcgtcggcctgaaggcgcggatgagcagcagcgtggtgggcgaaaacggcattacgccgctggcgcgcgccaaggccattcagcaggaaaacgacgatctgccgctgatggtgcacatcggcaataacccgccgaacctcgatgaaatcgccgatctgctgagcagcggcgacatcattacccactgctataacggcaagccgaaccgcattctgaatcctgccggcgagctgcgcagctctattactcgcgctctgcagcgcggcgtgcgtctcgatgtcggccatggcaccgccagcttcagctttgaggtggcgcggcgggcgattgcgctgggcattctgccgcacaccattagctccgatatttactgccgcaaccggatcgacggcccggtgcgctcgctggcgctggtgatgtcgaaattcctcgccatcggcatgacgctgccgcaggtgattgactgcgtgaccgtcagcgccgcagaagggctgcgcctgtcgcgtaaagggcggctggaagtgggcttcgacgccgatttaacgctatttcgcctggagcaccggccctcgctgctggtggatgccgaaaaagagagcctgcaggctgacaacattctggtgccgctggccgcgatccgcgcgggcaaaggctatctgaccgaacaagggagcgcggaacatgccttcgatttttgagaaataccatttaaaacaggtgattaatacttctggccgcatgacggcgctgggcgtttccacgccgcgcccggaagtggttgaagccgcgatggccggtatgaaccagtactttgaaatgaaagacctggtgaataaaaccggcgagtacatcgccaaactgttggatgtggaaggggcgaccgtggtctcctgcgcatcggcggggattgcccagtcggtagcggcggtgctggtgaaagacagcgactggctgctggagaatctgcacgttacgccgattgagaataacgaaatcgtgttgccgaagggccacaacgtcaacttcggcgcgccggttggcaccatggtggcgttgggcggcggtaagctggtggaagcgggctacgccaacgaatgttctgcccaacagctggcggcggcgatcactccgcgcaccgcggcgattctgtacatcaaatcccaccactgcgtgcagaaaagcatgctcaacgtggcgcaggccgcggaagtggcgcgccagcataacgtaccgctgatcgtcgatgcggcggcggaagaagatctgcagtgctactaccgcatgggcgccgacctggttatctacagcggcgcgaaagcgattgaagggccgaccagcgggctggtgattggcaaaacgcagtacgtcgagtgggttaagcgccagtcgatgggcattggccgggcgatgaaagtgggtaaagagggcattctcggcctgacctgcgccattgaacactacctgacggcgagcaaagagagcggcgagcagatggtggcgaagatgacgccgtttatcgaacagctcaacgcgcttaacggcgtgaccgcgcgggtggtgtgggacagcgcgggccgcgatatcgcccgcgccgaaattaaatttgatgaagccacgaccggcgtgaagaccggcgatctggttaacgcgctgaagcagggtgaatacgccatctacttccgcggctataaagcgaatgaaggcattatcgaagccgatgtccgcagcgtaaacgcggagcagctggcggtggtcgctcgccgcatcgcagaagttctgaataaggagaaacaagcatgaaactgaccccaaacttttaccgtgaccgcgtgtgcctgaacgtcctggcgggcagcaaagacaacgcccgtgaaatttacgacgcggcggaaggtcacgtcctggtcggcgtgctctccaaaaactatccggacgtcgccagcgcggtggccgatatgcgcgactacgcgaagctgatcgataatgcgctctccgtcgggctgggggcaggcgatccaaaccagtcggcgatggtgagcgagatttctcgccaggtgcagccgcagcacgtcaaccaggtcttcaccggcgtggctaccagccgcgcgctgctcgggcagaacgagacggtggtcaacggcctggtctctcccaccggtacgccgggaatggtgaagatctccaccggcccgctgagcagcggcgcggcggacggcattgtgccgctggaaaccgccatcgcgctgctgaaagacatgggcggcagctccatcaaatacttcccgatgggcggcctgaagcaccgcgccgaattcgaagccgtcgctaaagcctgcgccgcgcacgatttctggctcgagccgaccggcggtatcgatctggaaaactacagcgagatcctgaaaatcgccctcgatgccggggtaagcaaaatcatcccgcatatttacagctcgattatcgataaagccagcggcaacacccgcccggccgatgttcgccagttgctggagatgaccaaacagttagtgaagtagtgcccttgtccctcaccctcaaagggtgaggagcagcttatcccactgaaccatcaaggagttgctatgcctgtcgctcgtcatctgcttgtcgcttcactgtccctgtttgccgccgccgcgggcgccgcgcaaacccactatgcctgggtaggcacctataaccccaatggcgaaggtctgtatcgctttaccgtcgatgccaaaaccggcgccctgcgcgataagacgctggtgagctcgttgccgaacgtcgcgcaattaaccgtgtcgcgcgatggcaaaacgctgtatgccgccagtgaagtcgaaaaaggcgtggtgcaggcgtggcgcattgaaaagaacggcgagctgaccgcgctcaatcaggtcgcctccggcggcgccgggccggtgtatctctccctgacgccggacggtaagcatctgctggtggctaactatgtcagcggcagtatcgccgtgctaccggtgcaagaagatggtagcctggctgaggcggtggacaggcatcaggatgaaggcccggcaggcgccgaacgcccggcggcggccgtcgagggcagcttcgccatcagcgatcacaacggcccgcatgcccatatgatcgccgccgatcccagcgggaaatacgtttactctaccgatctggggctggatcggatctatcagtatcggctggatagcgccagcggcaagctaacgccgaacgatccgccgtttatcgccgcctcgtcgccgggggccggcccgcgccacttcgtctttacgccacagggcgacggcctgtggctgattaacgaggaagcgtcgacgctgaccttctatcatctggataagcaaagcggcctgctgcgtgaaggcaaaactgtctccgcgctgccggaagggtataaaggcaccagctttgccgccggacttgtgttgagcaacgatggcaaacagctatatgtcgccaaccgcctgcataacagcattgcccacttcacagtgctggccgacggcagcctgagtcaccaggaagatatctggacgcgtggcgattatccccgcaccctgacgctggataatcaggggcagtggctgtacgtcatgaaccagcgtagcgataatattacccgcttcagcgtggcgccgaaggatggcaaattaacctttgcctccgactatacgccggtcggtagcccatcgcagatggtgatatccgcccaaccctgagccgtaattacaaggaactgacatgcgatttcccaaccaacgcttagcgcaactcttcaccctgctgcgaaatgaaacgctgccgcaggatgagctggcgcaacgcctgtcggtttccacccgtaccgtgcgcgccgatattaccgccctgaatacgctgctggcgcagtatggcgcgcagtttatccttaaccgcggcagcggttatcagctgaagatagataatccgacgagtttccaggcgctggaggagaccgcgccgaaggcgcagcacgtgccgcgtaccgcccaggatcgcatcacgtttctgctggtgcgtttcctgacctcggcgttctccatcaagctggaagacctggcggatgagtggttcgtcagccgcgccacgttgcaaaatgacatggttgaggtgcgcgagcgcttccagcgctatcagctgactcttgaaacccgcccgcgccacggcatgaagctgttcggcagcgaggtgtcaattcgcgcctgcctgaccgacctgctgtgggagctgacccagcaaggcgatatcgcgccgccgatcggcgccgaggcctttgcggcggaggtgccagcgctgctggagccggtgctgcaggagacgctcacgcggcatcatattcgcctcaccgacgccggcgagcgctttgtctgcctgtatggcgcggtggtggtgcgccgcgtcagcgaaggctacccgctggccgatttcagcgctgaagatgtggcgcagaacgtccgcgacgccgcgcgcgagctgacgggcgagctgcagcggctggccgggaaacctttatcgcccgccgaagaagagtggctatgcgtgcatatcgcggcccgtcaggtgcaggatgtcgatccggaaactatcagcgccgacgatgatgaagcgctggtcaattacatcctgcgctacattaacagccagtataactacaacctgctggacgacgcccagctgcatgccgatctgcttacccacattaaaaccatgatcacccgggtgcgctaccagatcatgatccccaatccgctgctggataacatcaaacagcactacccgatggcctgggacatgaccctggccgcggtctccagctgggggaaatatactccgtacaccatcagcgaaaacgaaatcggctttctggtgctgcatatcggcgttgggctggagcgccactacaacatcggctaccagcgtcagccgcaggtgctgctggtgtgcgataccagcaatgcgatggtacggatgatcgaggcgatcctgcagcgcaaatatccgcagctggagatcgccgctaccatctcccagcgcgagtacgaacagcgggacgcgatcgaggcggatttcgttatctcaacggtgcggatcggcgaaaaagacaagccggtggtgactatcgcgccgttccccaccgactatcagctggatcaaatcggcaagctggtgctggtggaccgtacccgtccgtggatgctgaataagtacttcgatgccgcccacttccgggtggtggataagccgatggatcagcaaacgctgttcgccgagctgtgccagcagctgctggaggaaggctttgtcgatgccgagtttcatgcttcggtggtggaacgtgaagcgatcgtcagcaccatgctgggggatggcattgcgctgccgcactccctggggctgctggcgaaaaagacggtggtttataccgttatcgccccgcagggcatcgcctggggcgacgaaaccgcccatctcatcttcctgctcgctatcagcaagcgcgagtatgaagaggcgatggcgatctacgatattttcgtgactttcctgcgcgagcgcgccatgagtcgcctcgccgcgacccgcagcttcgatgagtttaaaacggtggcgatggagtgcgtcagccggttttgagaggcattttccagattcgagtgtaatacaaatgtaatgctatactgcattacaaaattcccctttccggaggcataatggccacgctcaatgttcgactggacgataaactcaaaaaagaggcttatgccgtgctggagaaactcgatatgacaccaacggaggtggtacgcctgctgtttcaatacattgcggaaaatggccgcatgccggtgaaaagtatgaccatcagtgatggcgaagcggcgttattacgcaccgttcgcgaacggctggaaaacccacggccgggggttaaggtgagtctggatgacctatgaactggagtttgatccacgagcctggcgcgaatggcagaagcctggcgagacggtcaaaaaacagttcaaaaataagctccagcagattgtgcagaatccgcgaattgagtcgaccaggctgagcgatttaccggattgctacaaaatcaagcttaaggcgtcaggttatcggttggtgtatcaagtacgagatagtgtggtggtggtttacgttattgccattggcaaaagagagaaagcggccgtttatcatcaggtgaataaacggctctaaacgctatcgcaaatgatgtacgacctggttgctgctgccgcgccagatcagcgccggatctttcaaatcctgcacaaacttaccgtcaaccagcacgttaatcaggttcaccacctgcatttgcgcctcattcagctcatcaagtttatagccggtccagacccagatatctttgccggggcattcggcgcgcacgcgctgaaccagtttgatgatctccgcgacgttctgcggatgcagcggatcgccgccggagagcgaaagcccctggcgtttgatgcgggtgtcgttgaggtcggcgatgatacggtcggccatctcagcggtaaacggcataccggagttcacccgccaggtgcttttgttgtagcagccggggcactcgtggacgcagccggagacaaacagggtgcagcgggtgccggggccgttgacgatgtcgacggggtagtactggtgataattcattttcgcttctcaattaacgccagagcggcgttggctgcgctcactcatcccagtcacgtactgaatgtacgctcctggggattccctcgtttgccgccttgctctgacgctaattgctttgcgaaaacgaaggagtgcggccatttcctggcgtcgctgcgctcggccgagctacaacagtggtagtggtagcccggataaggcgctgcgcgccgctatccgggaacggctccttagtggccaaacggctacggggccggtcccttctccccgttggggagagggtgaggggctaaaccagctggaattaaccaatctgcccattacccaggtgcttcacgcggcgcttcacttcttcctgcttgccggcgttgaacggccgcgcgtccgggctgccgagataaccgcacacccggcgggtaacggaaacgcgggcggcgtcgtggttaccgcatttcgggcaggtaaagcccttgctggtgcactcgaactcgccggtaaaaccgcactcgtagcactcatcgatcggcgtattggtcccgtagtacggcacgtgctgatagctgtaatcccacacgtcttccagcgccttgaggttatgctggatattcgggtactcgccgtagcaaatgaaccccccattggccagcggcgggtacggcgcttcgaaatcgatcttatcgtacgggttgaccttcttctccacgtcgaggtggaagctgttggtgtagtaacctttgtcggttaccccttccaccacgccaaactcggcggtgtcgagacggcagaagcgatcgcacaggttttcgctcggcgtgctgtacaggctaaagccgtagccggtttcttccttccacaaatcgacggcgtcgcgcaggcgctggacgatggctacgcctttctcacgcagcgcctcgctgtcgtacatatgctggttgccgtacagcgcattgatggtttcatggataccgatatagcccagagaaatggacgcgcggccgtttttgaagatctcggagacgtcgtcgtcggctttcagccgcacgccgcaggcgccttccatatacaggatcggcgccacgcgagccttcactccttccaggcgggcgatacgggtcatcagcgctttacgcgccagctgcaggcgctcgtccagcagcgcccagaaggcggcttcatcgcctttcgcttccagggcgatgcgcggcaggttgagactgatcacgccgaggttattgcgtccatcatgcacctgctcgccgttctcgttttcccataccccgaggaagctgcggcagcccatcggcgttttaaacgacccggtgactttcaccacctgatcgtagttgaggatatccgggtacatgcgcttgctggcgcactccagcgccagctgtttgatgtcgtagttcgggtcgccgaacttatggttcaggccgtcgcggatcgcgaacaccagtttcgggaacaccgcggttttgcgatttttaccgaggccggcaatgcggttgcgcagaatcgactgctggatcagccgcgattcccagctggtgccaaggccgaacccgaaggtgacgaacggcgtctggccgttggcggtatgcagtgtgttgacctcatactccagcgactggaaggcgtcgtagcactctttttcggtacgggcgcgggcatagccttcggcatccgggatctgccactcttcggcgattttgcgatgctttttgaagctttcgctgacgaacggcgccagcacttcatcgatgcggttgatggtggtgccgccgtaaatatggctggcgacctgggcgatgatctgcgccgtcaccgcggtggcggtagagatagacttcggcggctcgatctccgcgttgcccatcttaaagccctgggtcagcatgcctttcaggtcgatcagcatgcagttgaacatcgggaagaagggcgagtaatcgaggtcatgatagtggatcatgccgcgttcgtgagccatcaccacatcgtggggcagcaggtgctgccgggcgtagtgcttggcgacgatcccggccagcaggtcgcgctgggtcgggatgactttactgtccttgttggcgttttcgttgagcagcgcggagttggtctgctcgacgaggccgcggatctcctgattgagacggccgcgcttctcacgctggctatcgcggtcatggcgatactcaatgtaggcgcgcgccagctgcttataggggccggacatcagctggttttccaccgcggtctggatctcgttgatgtcgacctgggcgcggccctgcatttgttggctaacgacttctgcgacggtggcgcaatagtctgcgtcatcgactcccgctgctttagctgcacgcagaattgcttcctgaatgcgctctgagttgaacggcactttacagccatcacgtttcatcacatgcggtgtcatgatcactccatatatagaacaggttatccacagaggcggaggttatcccgaaggcgctgcacgctacggctcgtgctgtttaccttcggatccggcccgttttatccacatctcatcaccgccagacatcgacaagatatggtgacataatagacgattaatacaacatgttgggccgaggcgcattttaagttctatatgtagtgatttgcatcaaagatgtttgcgattttattgacccagaacaaggtaaaaaggtgagagtacggatgatgggcgctggcgataaatgtaaatttaggcgcttaaaatataagcaaaaatcgagcccgttcaggcatgaaacgggcaaatattcaggcaatcaacgtatcgttaagcagatcgaccagcagtagcagggcatagcgagcctgctgcgggtcagcgggcagcggcaggatggcgctggccatatcgccaagggcgtgctgttctggcgtcagagcaataatggtcactccctgcgtacgcgcctgcaaagtagcgctttgcaacacagggttggcctcggcagtggccagcaccagcagcagatgatcgtcattgagggtgctggcggtcagccgcatcagcgccgcatcctgacagagattaatcgcgatgccggagggcagtagctgatgctggagcagcgcggccagcgtcacgtcctgggcgccaagggcgaagcagtgtaccgcacgggcgctcagcaggcgcgatttacacttttccaccgccgcttccgcggtatggccgagctgacgagttagggtaacgccaaggctgctaagtttgtcgcgccaggcgacgggcagggcggcgctgtccggcgtaagccagctggcgcgccgttcgctggcctgcgccagctgtttacgcagatcacgaatatcatcgcagcccactgagcgggcgaagcgggtaatggtggcagggctgacccccgcgctggctgccagctcgtcaatagaggcgctggcggtaaagcttagattttgtagaataaaggtggcgacgcgcgactcctgggcactaaagcggcgcattccttcctgcagctgacctacgatatccatcctcatgttccctttggcaaaacccgcatttgaaaatatttttcaattatcgactgtctctctttatagcactcacgccgcatatttcctatggtcagagcagtaaagggtgacaccctggcgataaaaatgcgcaaaaattgagcctcgatcacatcggtgaaaattattttcatatagccttcactatcacacaatattaacaatatagtcgtccaggccctgagggctgaagcgataacacgtaaaggggaagcgcaatgacacgaatcgtactctgttgtgccgcaggcatgtcgaccagcatgctggtgaacaaaatgaaagcagaagcccagcagcgtgcgctggcgctggaaatctatgcggtggcggtggcggaatttgaacgcgaattgccacacgccgacgtcatcctgctcgggccgcaggttaaatatgaagccggacggctaaccgcgctggccgcgccgcagggcaaggcggtggcggtgatcgatatggctgactacggcatgatgcgcggcgctgcggtgttggataaagcgctagccctgctcgaacactaattttctcatcccgtttttcatcatcatcacgtgcggtcctggcgatcgcgcgcggcgctctgtatgccgaaaatccgaaaagaggacactatgcaagcactgaaaattgccgttatcggcggcggcagcagctacacgccggagcttattgaagggattatcgttcgttacgagcagcttccggtcacagagctggcgctggtagatgtcgaatccggccgggaaaaggtggagatcatcgccgcgctgacccggcggatgctgaaacataaagggctggagcaggtggcggtcagcgtccactttacgctcgatgaggccatccgcggcgccagctttgtgctgacccagctgcgtgtcggacagctggcggcgcgcgccgccgatgagcggctgggtctcaagtaccacctgctgggccaggagaccaccggcgtcggcggttttgccaaggcgctgcggacgatcccggtgatccttgaggtggcgcgcaaagtggaacagctggcgccggaagcgttcattctcaactttactaatccggcggggatcgtcaccgaggcggtcagccgctacagcaaggcgaagatcattggcctgtgcaacgtgccgatcaacatgcagcacatgatcgtcgggatgctgggcgcccaggagtccgaagtaaaactgcgctttgccgggctcaaccatatggtctgggtgcataaggtgctacaggggcgcgaggatgtcaccggcaaggtgatcgacatgctgtgcgacggtaaggcgctgtcgatgaacaacattaaagagctgccgtggccggcggaattcctgcgcgcgctgaaggcgattccgtgcccctatcatcgctatttttggctgacgccggcgatgctggcggaagagatcgccgcggcgaaaaccaagggcacccgcgccgaacaggtgatgaaagtcgagcaggagctgtttgcgctgtacgccgacccgcagctggaagaaaaaccggagcaactgagctttcgcggcggcgcctactactcggaggtggccgtcgagcttatcaacgcgatctacaacaacctgggcgcggagatggtggtgaatacccgcaacaacggcgcgattcatggcctggatgatgatgcggtggtggaaaccaacagcattattgatgcgcaaggggcgcggccgctggcgttcggcccgctgccgccggcgatgaatggcctgacccagcaggtgaaagccttcgagcggttgacgattgaagccgcggtacacggctgtcgcgaaagcgcactgctggcgctggtgaccaacccgctggtcggtaacgtcaccgatgcccaggcgctgctggatgaagtattaaccatcaaccgtcaatggctgacgcaatttaactgaccgctatttcccctcgggagcacaccatgtcgaatacaagctggattgaacgttacgtcatgccggcggcgctgagaatcgccgggcaaaagcacgtcctgtcggtgcgcgacggcatcattctcaatatgccgtttatgttgattggctcattcttcctgattttcgcctacctgccgatccccggctatgccgatatgatgagcagcctgtttggcgaggtctggcgcgataaaatgttgtacccggtgaaagcgacctacgacatcatggcgctgatttccagcttcggcatcgcctaccggctggcggagaagtatcgcactctcgatccgctgagcgctggagcgatgtcgctggtggccttcatgatgacgatcccgcagaacacgctgtttacgccggtacacggcgcggcggaggtgattaaaggggtgatcccggtgagcatggtcggcagccaggggctgtttgtcgccattgtcatttcgctgctgtcgacggagatttatcgtttggtcgccagccgcaatctcgttatccgcatgccggacggcgtgccgccggcagtggcgaaatcattcctcgccctgatccccggcttctgcgtgctggcggtggtgctggcgctgcgcctggcggttgaggcctcgccgttcggcgacatcaacagcatgatcgccaccctgattggtattccgatgcaccacgtcggcggtacgctgccgggcatgattatttcagtcattttgattggtattttgtggaccctgggcctgcacggcgacgcgatcgtactggtgtttatccagccggtatggctgtcgaatatgtccgagaacctgacggccttccagaacggtcagccgatcccgcatatcattactcagcagttttacgatctgtggattgcccccgggggtaccggcgcgctgctggggctggtgatttttatgttgctgcgtagccgtagccagcagatgaagcagctggggaaaattgccgcgcccggggcattgtttaacatcagcgagccgatggtgtttggcatcccgctggtgatgaacccgtactttttcctgccgtttattttaacgccggtgctgctggtgatcgtgtcctataccgcgatggcgaccgggctggtggcgccgcccgccggaatcgcgctgccgttcaccacgccgatcttcatcagcggctatctggcgaccggagggcatatctccggcacggtgctgcaggtggtgaatttagcgatttcgctggtggtctactatccgttcttccgcgcctgggatcggctaaaggcaaaagaagagcacgcctcggcgcaaccccaagcgagcgctgcgattgctgatgccgaccgcgcataacttccagcctgacgaatcgtagccccggtgagcgttgcgccaccggggaaaagcgttatccctgcagccaccatatcgcttcgaacggccgcagcgtcagcccggtcgggcgcggggtggtctcggcatagttgctgatgatcatcttccactcgcccggggcctcagcgggctgccaggtctgcagctcgcggctcaggttagcggcgactaccagcgtttgcccctgccactgacgacgatagcaccacagcgacggatgctccggcagcagatcctcgtaatcaccccaggtcagtagcggcagggttttacgcagcgtaatcagctgctgataggtataaaacaccgaatcggggtccgccagcgccgcctcgacgttgatctcctggtaattatcgccaaggccgatccacggctcaccgtcgctgaagccaccgttctcgccggcgtgccacggcatcggcgtgcggctgttgtcgcgcgacttgctggcgaggatcgccagcagttcgtccgggctttgcccctgcgccgcacgttcgataaacatattgtggctttcgacgtcacggtaatcgctgatgctgctgaagtgcggattggtcatgccgatctcttcgccctggtagatatagggcgtgccctgcatgccgtgcagcaccatcgccagcatcttcgccgccgtcacccggtactcgccttcgtcgccaaagcgcgacacgatgcgcggctgatcgtggttacaccagaacagcgcgttccacgcccgattgtgcattccccgctgccagtggcggaacagcgccttcagcgccacatagtccgggcgggcgagggtccatttctctccgccgggataatcgacttttaaatggtggaagttaaaggtcatcgacagctcgcggccgtccagcgcggcgtactgctggcagtgctccagcgaggtggaggacatctcgccgacggtcatcaggttacgcggggtgaagacatcgcggctcatctcctgcaggaactcatgcacccgcgggccgtcggtatagaagcggcggccatccccgtccagatcgcagggaaaggtctggtcttttgagatcaggttgaccacgtcgaggcgcagaccgtcgacgccgcggtcagcccagaattcgcagacctttttcagctcggcgcgcaccgccggattctcccagttgagatccgcctgctcaatggcgaacaggtgcagataatactgcccgctgtcggcgtgccactgccaggcgttaccgccaaatttggagcgccagttgttcggcagggcgtctggttcgccatcgcgccagatatagaactgacggtaggggctctccttattcaacgactgacggaaccattcatgttcggtcgacgtgtggttcagcaccatatccagcacgatgcggatgccgcgggccttcgcctccgtcaccagggcgtcaaagtcggccattgtgccgtaggagggatcgatggcggtgtagttcgccacgtcgtagccgttatccacctgcggtgagacgtagaacggcgtcagccagatggcgtcgaccccaagcttttgcagatagtcgaggcgggaggtgacgccgcgcaggtcgccggtaccgctgccggtggtatcctgaaaactcttcggatagatttgataaataacgccgttttgccaccagtgggggagatgattcatagtactttcctgctgcaacgaggggcgccaaaggcgccccgaaagaagaagttagacaatctgcaaggtgccctgacggtacttgcgctgatacaccacgctggtgaggataatcggcaccaccaccgcgatagccatcgccatggcgtacacctgccagtaggtaggctggatggagaggatccccggcaggccgccgacgccgatgccgttcgccagcacgccgttcagaccgcacagcaggccggcgaggccagagccaatcattgcgcacagcatcgggaagcggtatttcaggttgataccgtacatcgctggctcggtgaccccgagataggcggagatcgccgccggtaccgagatttcacgttcattctgcttgcggctggcgatgatgatgccgaccaccgccgacgcctgggcaatattcgacagcgcaatcagcggccacaccggggtgccgcccatgctctggatcatctgcatatcgatagcgagggtggtctggtggacaccggtaatcaccagcggcgcgtagaggaagccgaacagcgcggcgccgatcggcgcgaagctgccggttaacagatggcgtaccgcgaaggccacgccgtcgccgatcaggcggccgaacggaccgataatggcgtgcgcgaggaacaccgcgaggatcagcgagcagaccgggacaatcaccaggtagaggtagtcaggcacaatgcgcttgaggcgcgtctcgataaagcctaaggccaggccagccagcagggccgggatcacctgcgcctggtagccgactttggcaatggtaaacaggccgaagttccacacctccggcacctgctggccgaggagataggcgttcatcagctgcggggagacgagggtgacgccaaggacgatcccgaggatcggcgtgccgcccatcttcttcaccgctgaccagcagatccccaccggcagatagaagaagatcgcctcgccaatcagccacaggaagtcatagatggttttcagcgacgggtgcatctgggccagcgtctggccattgctcatgggcaggtcgccgataacgttgcggaaaccgaggatcagaccgccgctgatcagggccggcagcaggggaaagaagatctcggcgaagtgcgagattaactgttcatgccacttcatattttgccgcgcggcctgcttgacctgctctttgtcggcggaggtctggccggtggtcgccagcagggccttgtagtaatcgcccacctcggtgccgatgaccacctggaactggccggcgttagtgaagcatcccttcaccatgcgcagctgctcaatttcttttggtctggcgatggccgggtcgttcagcacaaagcgcaaacgggtaatacagtggctgacggtggcgatgttaccgcgcccgcccaccagttcgatcagtttatcgatgtcctgctggtttactttgctcatgatgaagcctcaaaaacagaggggagagatgccgtttttaccttgagggcatcctaaccgttccgcttaatttgcaaaatgggaacgttcccgaaacccggcgacgatcacataaatcgcccgagcgagattaattgagggcggcgggaatcacgatctggcggggatcgacgctgccggcgatctgctcgatcaactgccgggcggcccggcgtccggactcggcatagcccggatcgacggtcaagatttccgggtggagaaacttcatcagcggcgtgctgccgacgctggcgagctgcagcgcatcgcgaccctgctgctggaggtacttgctggcgccgagggcgagggtatccgtcgcgcagaccagggcgctggtttcagccgtcagcacgctggcgacggtgtcatatccctgcttcatgcccagccccggcagggcggcggtgggcgtcagacgatgctttttacagaaggcgaggtaggccagatggcggcgttcgccggtggtgacgtcgctgtgcggtacgccaagaaaactgatgtggcggtgtccgcgatcgtagagccgctgcatcagcagcgtgatggccccctcgtcgtcatagcacaccgaggcgaagccgggagcgtcgcgggccatcagcaccagggtgtcgcgccagggggcgagcatcgcttcgtcgatgccggtaaaaccgaacagcaccacgccgtcaatattgcgccgggcgagcatgccgagatgctcctccaccaacgccggggagaactggctctccatcataatcggatcgtaaccctgctcataaaaggcgggcagcatggtctgcacggcaaggttttccgacagcgaatcgagacgggtgacgataatcgccaccactttatcgctctggccgcgcatggcgcgggcggaacgggagggcgagaaaccgtgctgctgcatcaccgcttcgacgcgctcgcgggtccgttcgctgaccccgctctcgttgttaaggacgcgggataccgtcgatttccctacgccgcttaagcgcgcgatatctttgatggtcagccggttctgcatgcggaattctcgtcagggatggtagaagtgagcctaatgctactcaaccaaaccgcaatgagcaaagtctggtttacgttcggtttagttgcgcgggtttatcatcgccattattgccacacaatcctcagcgagggcgctataattcgcgccgtttatattcacttaccggagatagttatggaccccgatcccactcctcatcctcgatggagcaacctttctttccggtaagcctgtttaacactgctttaccggaaagcgtaaagcagtgacgtccttgatgtccctgccataaaaataacatgcctgacaggtaggttttgctacgcccgtcggcaacgctgcgttcgctttggcgagcgcggagggactgtttatgctgaaaaattatacccggcagctgttcgcgcagcttagccgccatctgccacgtcgtttagtccagcgcgatccgctgccggacgcccgccatctggcgagtggccccattcctgaatcgcttggtcagcattgcctgaacgtggcggcgatggacgaccaggagatctggcgcgcctttgacagccaccctgaagggctcaatgaaggcgaagtggcggcaaaaattctcaaacatggtgacaaccagatcccggcgcagaagccctccccgtggtgggtgcatctgtggacctgctatcgcaacccgttcaacctgctgctgacggtgctcggcatcgtctcctattccaccgaggatctgttcgccgccggggttatcgccctgatggtggggatctcgacattgctcaatttcatccaggaggcgcgctcgaccaaagcggcggatgcgctgaaagcgatggtgagcaacaccgccaccgtgctgcgggtggtgaacgagcagggggagagccgctggctggagctgcctatcgaccagctggtgccgggcgacattatccggttgtcggcgggggatatgatcccggcggacctgcgtatcctgcaggcgcgggatctgttcgtcgcccaggcctcgctgaccggcgaatcgctgccggtggagaaagtggcccgcagccgcgatccgctgcagcaaaacccgctggagtgcgacaccctgtgctttatgggcaccaacgtggtgagcggctcggcgcaggccatcgtcttcgccaccggcggccgcacctggtttggccagctggccggccgcgtcagtgaacaggagagcgagccgaacgcctttcagaaaggcatcagccgggtcagcatgctgctgatccgctttatgctggtgatggccccggtggtgctgctgatcaatggctacaccaaaggcgactggtgggaggcggcgctattcgcgctgtcggtggcggtcggcttgacgccggagatgctgccgatgatcgtcacttcgacgctggcgcgcggggcggtgaagctgtcgaagcaaaaggtcatcgtaaagcacctcgacgccattcagaatttcggcgcgatggacatcctctgcactgataaaaccggcaccctgacccaggataagattgtgctggagaaccataccgacgtctccggcaaggtctgcgagcgggtactgcatgccgcctggctcaacagccactaccagaccggcctgaaaaacctgctcgacaccgcggtgctggagggcgttgagctggatgccgcccgcgggctggcggaacgctggcagaaggtagatgagatccccttcgacttcgaacgccgccgcatgtcggtggtggtgaaggaggatgacgccgcgcatcagctgatctgtaaaggggcgctgcaggagatcctcaacgtctcgacccaggtgcgctacaacggcgatatcgtaccgctggacgacaccatgctgcgccgcattcgccgggtgaccgataccctcaaccgacaggggctacgggtggtggcggtggcgaccaaatacctgccggcccgcgaaggcgactaccagcgcgccgatgagtcggacctgatccttgaaggttacatcgccttcctcgatccgccgaaagagaccaccgccccggcgctgaaggcgctgaaggccagcggcatcacggtgaagatcctcaccggtgacagcgagctggtggcggcgaaggtgtgccatgaagtgggactggatgctggcgaagtggtgattggcagccagattgaagccatgagcgacgacgaactggcggcgctggccaaacgcaccacgctgttcgcccgcctggcgccgctgcataaagagcgtatcgtgacgctgctcaagcgtgaaggtcacgtggtgggctttatgggcgacggcatcaacgacgccccggcgctgcgcgcggcggatatcggcatctcggtcgacggcgcggtggatatcgcccgcgaggcggcggatatcattctgctggagaagagcctgatggtactggaggagggggtaatcgaaggccgccgcaccttcgccaacatgctcaagtacatcaaaatgaccgccagctccaacttcggcaacgtcttcagcgtgctggtggccagcgccttcctgccgtttctgccgatgctgccgctgcacctgttgattcagaacctgctgtacgatgtctcccaggtggcgatcccgtttgataacgtcgatgatgagcagatccgcaagccgcagcgctggaacccggccgatctcgggcgctttatggtcttctttggaccgatcagctcgattttcgatatcctcaccttcggcctgatgtggtgggtgttccacgccaataccgtggagatgcagaccctgttccagtccggctggtttatcgaagggctgctgtcgcaaacgctgattgtgcacatgatccgcacccgtcgcattccgttcgttcagagccgggccgcctggccgctgttcgccatgaccctggtggtgatggcggtgggtatcgcgctgccgttctcgccgctggctagctacctgcagctgcaggccctgccgctgagctacttcccatggctggtagcgatcctggcgggctatatggtgctgacccaggccgtgaagggcttctacagccgccgctacggctggcagtgagagacgcgttttcggatgatccacgtaaaaaaggcagccactggctgccttttttcatgccgaggttagcgatcagcgacgcacggcgatggcttcgatctcgatcttcacgtctttcggcagacgtgcgacttcaacgcaggagcgcgccgggaaggtggcgttatgctcggtgaagaacgcttcgtaggtggcgttaacggtagcgaaatcgttgagatctttgacgaatacggtggtcttgacgatatcgccgacggtgaggcctgcggcttcaacgatcgctttcacgttgttcagcgactggcgcgcctgcgcggacacgtcttccgggacgctgccggttttcgggtcgaccgggatctggccagaggtgatgatcatgctgccgaggtcaacgccctgaacgtaggggccaatcgccgctggtgcattttccgtcgcaatagttttgctcatgttatctccagatgaactgagtaatgttacgcaaaatcattcaggttgccgccaggcggtaagcgctgtatcgccggcgcagacgccgcctgaaggacgaagcgtagggtggtagccattatagggaggcctaccaccaataccaaccgcatttagttggccagcaccacataatgagaaaactctttttcgcagtatttgcatttgagtgcgatgtcatcagcgcgttttttcactgcaaaactggaagaaaccggttcggcgtggctgatacagttgctgttcgggcagaccagcacgctgtcgatacgatccggcaagctcgggcgggatttgcccaccacttcgtaatcatcaatgcggtttaccgtcgcctgcggggcgtacagcgacagctggttaacctgctcgtcggtcaggaaggtgttctcgattttaatcaaatccttgcggcccatctcgccggagggcaggttcaggccgatggtgatgcgctggtcggtttcggtcagtttgaacagggtgagcagcttaaagccgacctgcgccgggatatggtcaatcacggtgccgcgtttgatcgcttctacctgcagtttattgtcgtgtgtcatctctcattcccccttacagtgccagctcgctattcagtaccagtgccagtaacgcctggcgggcgaagatgccgttaccggcctgctggaagtaccaggcgtgcggtgttttatcgacatcggtggtgatttcatcaatgcgcggcagcgggtgcagcactttcatgttggcgcgcgccccttcgaggtcggcggcgcgcaggacgaactgcgctttgacgttggcgtattccgacggatccagacgctctttctgcacgcgggtcatgtacagaatatccacttccgccatcacgtcgtcgatggcgctatgcaggctccaggcgatgcctttttcatcgagcatatcgaggatgtactgcggcatggccagcgcgtccggggcgatgaagtagaagcggttgccgttgaatttggccagcgcctgggtcagggagtggacggtacggccatacttcagatcgccgaccatcgccacgttgaggttttcgaggcggccctgggtctcctgaatggtgaacaggtcgagcagggtttgggtcgggtgctggttagcgccgtcgccggcgttcagtaccggcacgccgccggagaattcggtcgccaggcgcgcggcgccctcctgcggatgacgcatcacgatggcgtcgacgtaggtgctgatgacggagatggtatccgccagcgtttccccttttttgcccagtgaggtgttggcgctgtcggaaaagccgaccacgctggcgcccaggcggtgcatcgaggtttcaaaagagaggcgggtgcgggtcgaggcttcaaagaagcagctggcgataaccttatgcttcagcagctcgggttgtggattggctttcagctttgccgccgtcgccagcaccagttcgaggtcttcgcggctgagatcgtttatggaaatgatatgtttttgatatagcgggttagccatgcttatctcctgacgcctgggcaaaaaaaaagccccttaaataaggggcttcgggaatccaatgagcaacggaaagaaaaacggcaggccagcgtctgcattgagacgcgctaagacagaatgtcgtacgcaattggccatgcttcctcccggcaaaacgactggcattatacgcagaccgttatgacgatcaagcgattcattcacaaacaggtaatcgtttgcctgtcgaaaagtgcgccagcgcaaagaagcgtgaaactgtactggtatggcagcggtgatgggggtataagacaaagaaatgaaatgctgttttatatttgaggtaagcaatgattattggcaatatccaccatctgcagccatggctgcctgccgcgctgcgcgaggctatcgaacacgttatcgctcaggtcagcgaggcgacgccgctgggtaaacacgatatcgacggcgacaacctgttttatctgatttctgaagacaccaccgagccgcaggccgcgcgccgcgcggagtaccatgctcgctatctcgatatccagattgtgctccgcggcagcgaggggatgaccttcagcaccttgccgccaggagagctgcagaccgactggctggcggagaaagacatcgcttttcttgccgaaggccagcaggagaaaacggtgatcctcaacgaaggggactttgtggtgttttatcccggcgaagtgcataaaccgctgtgcgccgtaggcgccccggcgaaggtgcgcaaagcggtggtgaagatgctgatggtttagttgacgagcttttttacccagagctagcaattgtcatattgtgacaattgctattctttgtttttcctggctattcccgcttttttacttcttattccctctcatttgctgcttcagccaaacgctcataccgagcgcattgtgcaaattttgatggcgatctcattaatacgttatataacgtattaatgttgtttccgctaatttgaacaatcaataatgagatctggagttcttactgtatgaatactaaagaaataattaatgccgttgctaaagagatagaagacaaaggcggaatccgccaagtgttccttgttgcctgcggcgggtcattagtggatatgtatccggctaagtacttcctggatagcgaggcgacgaagcttcatgtcggcatgtataccgccaatgagtttgtctacgcgacgccgaaaacgttaggggagaattcgctggttatcgtctgttcgcacgggggcaacacgccggaatccgtcgctgcggctaagcttgctcaacagcatcaagcgcatactattacgctgactcacaacgctcaggcacagttgatcgaatacgccagtcacaacattctctatgcctggggtaacgataccaatgtggtcgataatccgatggcgattatcctcaacctgtgcgttgatacgttgcagcaggtggaaggtttcaataattacgctgatttccaacagggaatgacccaaattaatggcgtcattgctcatggccgtcagcaggttgcggatcgctgccagcgttttgcccaaaaatatcaagatgaaaagctcttctatatcctctccagcggagcttcttatggccatgcttatggttttgctatctgctcactaatggaaatgcaatggctacatgccgcacctattcactccggtgagtacttccacggaccttttgaagttacgaataaagagacgccgtttattttattgatgaacgaaggccgtacacgggcgatggatgagcgagctttggccttcctcaccaagtatgcagaaaaagtggaagtcgttgatgctaaagaactgggcatcggggttcttcctccgtcagtcgtggagtttttcaacccggtactgttttacagcatcatgtgtgaatatcgttctgcgcttgccgacattcgccagcatccattggatacccgccgctatatggggctggtggaatactaaggggaattatgatgaatgtgattgggattggcgataacgtcgtcgataaatatgttcatactcagactatgtatcccggtggaaatgcgctgaactttgccgcttatgcggccatgctggggcacaatgcggcctatttggggatttttggtaatgatgccgctgcggaatacgttatgcaggtgctggataaagttggcgtcaagtggccacactgtctgcaggtggcaggagagaacggctgcgcacagctgaaaatcgaagagggagaacggatatttcttggttcgaacgccgggggtattcgcaagacaacttcgatggattttatttttcagcatgagcaatacctgcgtgagtttgatctgatccatagcggctgttatagctacatggagacgcacttacctcagttacgcgagctcaacattcctgtctctttcgatttttcagatgactttgtactggagcaggcgctgccgctgtgccgttacgtcgacttcgccttcttctcatgcgccgactacagcctggcgcaaacacgtgaaattgtgcaacaagcgcaggccagcggaagtcgcattgtctgcgcgacgcgtggagatgaaggcgcgattttatttgacgggcaggattggtatcagcaggcgcccgattacgtcactcccgtcgatacaatgggtgcaggtgatgcttttattaccgctttcatttgccattttctggcccaacctacgggtaacaagcgcgaagcgattaccaagagcctgcaaaaagcagcagctttctcggcacaaatttgcctgaaagaaggggcatttggctacgggactcactactaacctataacgccatctctcatttttccgtactgatttccgtccgctagccgggcggaaagggggattcctgcgctttttccgtgaggaaagaattatgcatagtgatgctgctgatttgattttacgttctgatgctatttttactgctgccagaaatgagctatttagcggatatgtagtcattaaaaacggcgctatcgcggcgatgatagcgaatggggaagatattcaaacctggagaggtgaaagaactcgctttatcgaacttggcgatcgcctgatttgtcccggattttgcgataatcacacgttttttaccggctatatgagcatgcagcgtggcgtcgatctccatgccgcccgcgatagtaatcatgcccttgaactattacaggatgcagaaaaacttctccctgaggggaaaagcctctatggctggggctggtctgctgcccgttggggagcggtgcctgatgccagactattggatgacgctttcccgcagagaccggttgtcgccattaacgatgacaaaagctattgctggatgaaccgtgccgccgtggagctttatggctttaccgctgaagagtgcagcgcggaggcgagaatcgcattattggatgagatgctgtctgataccgcacagttaaaaaaagaaatgcgggcatttatggcccgacttgccgggcagggaatcacggcaataaaagacgtttgtttcaacgatgcgccgcagttgatgaatgcctgggatgaactggaaaaagaggatgcgctattgctgagagtaagcattgtttctcagcccgtatctgcgcctgtcgatcttgctttcggtgaacaggcccgacgccgctttcattcgccatggctgcggtttcatggctttaaatttatggtcgatggcgttattgccgatcataccggcgatatgatttacccctatgccgatcgtcccggcacgaacaatgaacgacccgttgattataatgccctgcgccagcaggttttgttggctgatgctcgtggattcaactgctgtatgaatgcggagggcgatgccgcaattcgccgctgtattgatatttttgccgaatgccgtaagcgtcacccgcagagcgtggttagacattctctgagcgatctggaatgtccgcatccaaacgatattcccagaatggctgagctcggcctttttgccgaagtttatgcacaaattctgctccttaacccctgcgaagccgaagcctatatgcgcgaacgctatggggaagagcgcgaagcgcaattctacgattatgccgcactatttggggctggcgtgacggtgactattggcaccgatctgcccctgtttattccttctgttcctgactcgatgtatgccgcctgcagtcgtcagttccctgatggttcacccgtgaatggctggtaccgcgaacgcggaatgacccgacaacagctcttaacggcatggacgctgaatagtgctcgacaccacggcatggaagagatgaccggtagccttgagccgggaaaacgcgcggatatcgcggtttttgaccgtaatttgttgagctgcccgaatgatgagttacggacttctaccgttgtactgaccctggtggatggccgtattacccatgaccttctgtaactctaaaaatgccgaaagacggcaaacataatataaacatcttatcgaggcggattatgcgtattgcaaaaataaagtgggcgatgccacactgctacgctctgattttcttcattattatattagtagcgctgctgacatggtgtattcccagcggcagttttgattatcactcagtgaccttacccggcggtgaaactaaaacattagtgatcccagggtcttatcatctgctggacaaagtcagcagcgagggcgatttacgtcagggtattgccgccgtactggccgcgccgatggaggggattatcaaggccgccgacgtagtggcgtttgtgctcattgttggtggcgcttttggcattattttacgtactggcgcaattgagcggggtctggtggcgctggctgaacgcctggcaggtaaaggaattttggttatccctatcgcaatgaccttgtttagcctgggaggcgcgacttttggtatgagcgaggaggtgatccccctgtatgcgatctttatctccctgatgttcgcgctgggttatgactcaatgactgcgatcctgattctttttctgggaacccagattggctacgttggcgcaatgaccaatccgttctctgtactcattgcccagggcgtagcgggtattcagggaaatccgcagctttggctacgtgctattgcatggctggtcttcacgctactggcgattgcttacaccatgtggtacgcgcaccgtgttaaacgcactccgcaaaagtcgccggtatatgaaaatgattgtcgcaaccgcgagcagtttttgtcgatacaggatacgtcggtccatttttccatcgccgatcgggtaattatcatcgcctttgtgctggcgctggccgtcatctcatgggggttaatcacgcgtggctggtacatggttgagatcggctctgtgttcctggctctggggctgttttccgggatcgtcgggcgcatgggcattagcgggatggccgacagctttgtcgaagggtgcaaagagtttgtctacgccgccgtagtgataggtcttgcgcgcggtattctggtggtggcggagaacggacgaattatcgatacgttgctatttggtttgtctgaaatgctggaagggttgccgcagtatgcgtttaccactctgatgctattagggcataacgtcatcaccttttttgtgccctcatcttcgggcgaggccgcgctcactatgcccgtgctggcgccgttaggcgatttggttggtatcaataaagaggcgatggtgatggcttatcaatttggcaatggcctgacgaacctggtctctcctaccggcggtgtattgctggctgggttgtctattgcgcgcattgggtttggtcagtggttaaaggccattgccccgctgtttccggtgctgtggatagttagcgctgcttttgctgcgatttcggcctgggtctgaaggatatgcgcgccgtcgtagtttgatgtgcgcgcttcgattataatcctgcttcgcattaatggccgtgctggtacctcttttatgtcgaattttggactgcaacagaatacttccgtaccgttatacaggcagcttaaagataaaatcctcagcgatatttcttccgggaaactcgctgaaggagagaaaatccccaccgagattgagctcagcgaactctacaatatcagccgtattacagtgcgcaacgcagtgaaagagctggtagccgaaggctatttggtaaaaaagcaggggaaggggacttttgtctgtctgcctaaaattgagcgtaaagttgttcacttacttagctttactgccgcatgcgatgctaaccatctaccaacccatagcgtagtgactcgtcgtgagattctgcaggactatcgtaatgcgcgtcagcttcttgagcttgagagcgatgattccgtgctttatatccaacgccttaggatcgctggcgatgcgccgttaatgttagagaataattactactctctgaaacgattaggttttttacagcaggaggatcttagcgggtcgctgtatcagctattgcgtgaaaaatacgcgatcgtgcctacctatgcgggtgaaacgacagtagaaatggtgcgtgcggattctgacagcgcaccgctgctgaagcaaccgcccggcgaaccgttattcctgatgaaaacgctaattctggatagccagcatcagcctattcattatggagaacagtatatcgtcgccgagcgttacacgtttagtttctgatttcagcgtgaaagcgtcgccaccatcaccgctttgatggtgtgcatccggttttccgcctggtcgaagaccacgctcgccgccgactcaaacacctcgtcagtcacctccatgccgccgtgcaggccgtaatcggcagccatctgtttgcccagcgtggtctgatcgtcgtggaacgccggcaggcagtggaggaacttgacctgcgggttgccggtgagcgccagcatcgcgctgttaacctgatagtcgcgcagcagggcgatacgttcggcccatttttccttcgcctcgcccattgagacccagacgtcggtatagataaaatcggcgcctttcacccccgcggcgatatcttccgtcagggtgatgttgccgccctgctgtttggccagcgcggtgcaggtctccaccagcgcggcctccggccagcaggccgatggcgccaccaggcgcagatccagaccggtcaaggcggcggcttccagcatcgaattgcccatgttgttgcgcgcgtcgccggcgtagaccagcgtcatctggttaaaggctttgcccggcagatgctctttcatggtcagcaggtccgccagcagctgggtggggtggaactcgttggtgaggccgttccacaccggcacgccggcgtattgcgccagggtctctaccacttcctggccgtggccgcggtactgaatgccgtcgtacatccgtccgagcacgcgggcggtgtccttgatcgactctttatggccaatctggctgccgctgggccccagataggtcacgcgggcgccttgatcgtatgcggcaacttcgaaagagcatcgtgtacgggttgagtctttttcgaagatgagcgcgatgttttttcctgccagtttctggacttcgataccgtttttcttatcggctttcagctttgccgccagctcgagcagggcggtgatttctgcaggcgtaaaatcgagtaactttaaaaaatgcttctggtaaaacgcagacatggttccctcacctggcataggccactaattgaattaaaattcaatttatatgtatgaatattcatttgcaagtctgtgatcgaaatctttcactgagaagtggaggcaatgacggcggtatgtgacaatagggataactgccgcacattatgaggaacgagccatggcaaacccggaacacctggaagaacagcgtgaagagacgcgtctgattatcgaagagctgctggaagatggcagcgatccggacgcactgtacacgattgagcatcacctctctgcagacgatttcgaaaccctggagaaagtggcggttgaagcgttcaagctgggctacgaagtgaccgagcccgaagagctggaagtggaagagggtgacatggtcatctgctgcgatattctgagcgaatgcgcgctgaacgcagacctgatcgatgcccaggtggaacagctgatgacgctggcagaaaaatatgacgtcgagtatgacggttggggcacctattatgaggacccgaacggtgaagacggcgacgacgatgacgaagagtatgtcgatgaagacgacgatggtgttcgccactaagtcgcaaatgtcgtagatggatacggcggcgcctgccgccgtatagcaaggaactttcatggattacccgcagattctttccccgattatcaacttcctgcactgcccgacgccgcaggcgtggattgacgaagcccgcaagccggaaaacctgccgctgctgctgaccgaccatatggtgtgcgagctgaaagcggcgcagaacgccatgctgctggtgcgtcgctacgtcgcggataaagctgacgccgacgaactgttggcctgcctgaagccgtacgaagacttcacctaccgccgggggccggagccggattttgtcgccctgcataaacggatcaacaaaagcgccatgccgcagaccgacgacccgtggggccgccagctgctggacagcatgattttattgattaaagaggaactgcatcacttctggcaggtgcgggagatgatgctggcgcgcgatatcccctacgtcaaaatcaccgccagcaactatgcccgcggcctgcggcgcgaagtgcgctcgcatgagccggtgatgctgatcgataagctgatctgcggcgcctatatcgaggcccgctcttgcgaacgctttgccgccctggcgccgtggctggacgacgatctacagaagttctacctgtcgctgctgcgctccgaggcgcgtcactatcaggactatctggatctggcgcagaagattgccggagaagatatcagcgagcgggtgcgccagctcggcgaggcggaagcggcgctgatcctccgtcccgaggccgagttccgctttcacagcggtgtgccggtagcggcgtaacccacgatattcgggcccggtagtcactaacaccggcagtttcagtagccatggggagagagatagcgttgagagcttcagctcgcaatggtacgggccgtaggtcgggtaaggttagccgccacccgacaaaaaaacggcaccgcgagcacgggtaaggtgccattcgggacatacctggctcgcgctacgcttaaccgggctaccgaactgtagccccggtaagcgtagcgctaccggggacgcctgcgatatcgaggcgctacagcgttttcagcatccgtacttcgcagtccacgtggccggtgcagcccagcggtccgtcaatgtgctcgaagccgagatgttcatataagccgatcgcctccgtcaggaaggcggtggtttccagatagcagcgcttaaacccttgttcgcgggcgtagtccagcgccagcagcgccagcttcttcgccagcccctggccgcgggcgctggtcataaaatacattttctgcagctcgcagatatccggctcgctgcaggcgagcggcgcgacgccgccgccgccaaccacttccccctcttgctccaccacccagtaggcggagcccggctggctgtacagctcatacagttcatcgagattcgggtcggcgaccgtatagcctttatcggcggtcaggccatattcagccgagacctggcggatgaccctggcgatggcggcattgtctgccgccgtaatgcgacgcagcaacgtcgccgcggggacgctcgtattcatacaatgactcattacccaaaaaagacgaatgatgatgttaataacatcgcgacaggggaaagcgcaagcgaggatgtttcataaaaaacgccccttgccgggtggcaaggggcgggaggatcacagcgcggcgatcaccgcctgctgctcaatcagcttcgctttcgcttccgcgtagccttccagcttctcgcgctctttagcgataactgcttccggcgcgcgggcgacaaagccttcgttggccagcttgctctcgatgcggccaatttcaccttcgattttggccacttctttcgccagacgcgccagctcatcttctttattgatgaggcccgccatcgggatcagcagctcggcgccgtcgacaatcttggtcaccgagaccggacctttatcatcggcaggcagcacggtaatgctttccagacgcgccaggttcagcaggaagctgcggttgtcgttcacacgacgctcggcctctttgctgcagccgcgcagcagcagttccagcggtttgcccggagcgatgttcatttccgcacggatgttacgcacggcgacgatcgcctgcttcagccattcggtgtcggccagcgccgcgtcatccacctgagaagcatcgtactgcgggaacggttgcagcatgatggtgtcggcggtgataccgcagatcgctttcacgcgctgccagatggtctcggtaatgaacggaatgatcggatgcgccaggcgcagcagaccttccagcacggtgaccagagtatggcgagtcccgcgcagctccgcttcgttgccaccgttcataaccggcttggtcagctccaggtaccagtcgcagaactggttccaggtgaactcgtacaggatgccggcggcgatatcgaagcggaagttatccagcgcttcgcgatacgctttcacggtgtggttgaattccgcgataatccagcggtcggcgagggagagcaccatttcgccgccgttgaagccgcaatcctgatcttcggtgttcatcagcacgaagcggctggcgttccacagcttattacagaagttacggtaaccttccagacgcttcatatcccagttgatgtcgcggccggtagaggccagcgccgccagggtgaagcgcagggcgtcggtgccgtgcggctcgatgccgttcgggaactgtttctcggtacgcttgcggattttatccgccagctgcggctgcatcatgttgccggtacgtttttccagcagctccggcagggtgataccgtcaaccatatccagcgggtcaatgacgttacccttggatttggacatcttctggccttcgtcatcgcggatcagaccggtcatgtagacggtcttaaacggaacctgcggcttgccgttttcatctttgatgaagtgcatggtcatcatgatcatgcgggcgatccagaagaagatgatgtcgaagccggacaccatcacgctggtcgggtggaactgacgcagggcatcggtgttttccggccagccgagggtggagaaggtccacagcgcggaggagaaccaggtatcgagaacgtcttcatcctgacgcagggcaacgtcggcgctcaggttgttttcctgacgcacttcgtcttcgctacggcctacgtagacgttgccgtcgttgtcataccatgccgggatgcggtgaccccaccacagctgacgggagatacaccagtcctgaatatcgcgcatccaggagaagtacatgttttcgtactgcttcggcacgaactgaatgtcgccgttttcaacggcttcgactgctggcttggccaacacgtccgcgcgcacgtaccactggtcggtcagcatcggctcgatcaccacgccgccgcgatcgccgtaagggacggtcaggtcgtgcggtttgatctcttccagcaggccgagggcgtcaaccgccgcaacaacggctttacgcgccgcgaagcgttccagtttctggaactccgccgggatctcgctggagtagacgtcggattcattgcctttggtgtcgtagacttccgcgctttcgcggatgtcgccgtcaaaggtgaggatgttgatcatcggcagctggtgacgacgacccacttcgtagtcgttaaagtcgtgcgccggggtgatcttcacgcagccggtgcctttttccatgtcggcgtgctcgtcgcccacgatcgggatgcggcggttaaccagcggcagcaccacgaatttgccaatcagatctttgtagcgcggatcttccgggttaacggccacgccggtatcgcccagcagggtttccggacgggtggtggcgaccaccaggtaatctttaccgtcagcggttttcgcgccatcggccagcgggtagcggatgtgccacatggaacctttcgattcgcggttttccacttcgaggtcggaaatggcggtgcgcagtttcgggtcccagttaaccaggcgtttgccgcggtagatcaggtcttctttgtacaggcgaacaaagacttctttcacggcattggaaagcccctcgtccatggtgaagcgctcgcgctcccagtccacggagttgccgagacggcgcatctgacgggtaatagtgccgccggattccgctttccactgccagattttgtcgataaaggcgtcgcggccgtagtcgtggcgggttttcccttcttcagcggcaatcttacgctcaaccaccatctgggtagcgatacctgcgtggtcggtaccggcctgccacagagtgtttttgccctgcatgcgctggtagcgaatcatggtatccatgatggtttgctggaaggcatgacccatatgcaaactgccggtgacgttcggcggcgggatcatgatgcagaagctctcctggctttcatcaccattcggtttgaaatagccctgcttttcccagtgctcgtaaagcggctgttcgatatcttgtgggttgtatgtcttttccattatttccaggttgccgtgttcaggttgaaaccagccatgcggtacgccttatagcgttcgcgcgccagttgtttcagattgtcttcgtaagggacaaagtctatcacttctgtgaaagcggtggcaaaatctgcaaagtttagccgcaggctgataagaatatcccgcgggctgctgttgcgcttttgcggccaggcaatctctaccggcgcgccgcctctcgggccttcgcccgccagattatgcggcacaaagctctccggcggccgcgaccacagcgcctcgtcgagacgaatcgcctgctgttcatcttcgcaggcgatcaggacgcgcttgccgttgcgccaacgttctgcggcaatgtcacacaccagctgctcgacggcgctcaggccgtcgacggtggcgtcattgtccagaagatagaacgttgcgtttttcatatatggggcttcttgttgtggatttaaatgcaaagccgggcggcgctacgcttacccggcctacagtgtgctgccgtttgtaggccgggtaaggcatcgccgccacccggcatatcacatcactcttcgccgttaaaacccgcacgattgagcaggaactgcgacagcagcgccaccggacgaccggtcgcgcctttggccttaccggaacgccaggcagtaccggcgatgtcgaggtgcgcccagttgtacttgcgggtgaagcgcgacaggaaacagccggcggtgatcgcgccgccaggacggccgccaatgttcgccatatcggcaaaattggactccagctgatcctggaactcgtcggccagcggcaaacgccatgcgcggtcgcccgccagttcggaggcgccgatcagctcatgggccagcgggttatggttcgacatcaggccggtgatgtgatggccgagggcaatcacgcaggccccggtcagcgtcgccacgtcgataaccgcttccggctcgaagcgctcaacgtaggtcagaacgtcgcacagcaccaggcggccttcggcgtcggtgttcagcacttccaccgtctggccggacatagtggtcaggacgtcacccggacgataggcgcggccgccaggcatgttttcacagcccgccagcacgccgatgacgtttagcggcagctgcagttcggcaaccatccgcatcacgccgtacaccgccgccgcgccgcacatgtcgtacttcatctcgtccatgccttcggcaggcttgatggagataccgccggagtcgaaggtcaggcctttaccgaccagcacgatagggcgcgcgtcctcagccgggttacctttatattcgatgaccgacatcagcgactcgttctgcgacccattgccgacggcgaggtaggcgttcatccccagctcacgcatctgctgttcgccgatcacccgggtgatgacgtttttgctgtaggtatcggccagctgacgcgcctgagaggccagataggcggcgttacagatgttcggcggcatattgccaagatctttcgccgctttgatgccggcggcaatcgccaggccatgctgaatggcgcgttcgccactggtcagctcgcgacgggtcggcacgttaaagaccattttacgcagcgggcgacgcggctcgcttttgttggtcttcagctggtcgaagctgtacagcgtctctttggcggtttcaaccgcctggcgaactttccagtagttgttacggcctttgacgtgcagctcggtcaggaagcagacggcttccattgagccggtatcattcagggtattgatggttttctggatgacctgcttatactgacgctcatccagctcgcgctctttgccgcagccaatcagcagaatgcgctcagacagaatgtttggcacatggtgcagcaataacgtctggccaggtttgccttccagctcgccgcgacgcagcagggcgctgatgtagccgtcgctgattttatcgagttgttcggcgatgggggagaggcgacgtggttcaaagacgccgaccacgatacaggcgctccgctgcttctccgggctaccgctttttacactgaactccatgcactatgctcctgaatcttaaagacaacagtggtggctacggctatactcgtcgcctttcaagttgcagatgcgccggctgcgcctgcttaccctgacgtggcacattgtgcgcgccaggggccacagccctgctgccttcttacaactcgaaatccattgagtatataattgcaagctttcgtaactcatatccgctgttgcggtgacttcgtgttaatcttaacgttattaaggcctgggttcgtcagaaaagatcctgacatgcagaaccgatgagtcatttaatcttagcgacgttttcgacgaccaaagagaataaatgacgtttaagccatgaaacaagcaattttcctgcactaaaacgggtttttacgggcgtatttatagtgataatcataagatatctggttcgtgagacgctgaaaagccagttggcgatcctattcatcctgttactgattttcttttgtcagaaattagtcaggatcctcggcgccgcggtggatggcgatatcccaaccaatctggtgctctcgctgttggggctcggcatcccggagatggcgcagcttatcctgccgttaagtctgttccttggcctgctgatgaccctcggcaagctgtacaccgaaagtgaaattacggtgatgcacgcctgcggcctgagcaaagccgtgctgatcaaggcggcgatgatcctcgcgctgttcaccggcgcggtggcggcggtcaacgtgatgtgggcggggccgtggtcgtcgcgccatcaggacgaagtgctggccgaagctaaagctaaccccggtatggcggcgctggcccagggccagttccagcaggccagcgatggtaacgcggtgatgtttatcgaaagcgtcaacggcaaccgcttccatgacgtcttccttgcccagctgcgtccgaaaggcaatgcgcgcccctcggtggtagtggcggattccggcgagctgtcgcagcagaaagacggctcgcaggtggtgaccctcaacaagggcacccgctttgaaggcaccgcgatgctgcgcgacttccgcattaccgacttcaataactatcaggctattatcggccaccaggcggtgagcgccgatccggacgacaccgaacagatggatatgcgcaccttgtggaaaacccacaccgaccgcgcgcgcgccgaactgcactggcgcttcacgctggtggcgaccgtcttcatcatggcgctgatggtggtgccgctcagcgtggtgaacccgcgtcagggccgcgtgctgtcgatgctgccggcgatgctgctttacctggtgttcttcctgctgcaaacgtcgattaagtcgaacggcggcaaaggcaaaatggacccggctatctggatgtgggcgattaacctgctctattttgcgctggcggtgctgttaaacctgtgggacacggtgccgatgcgccgcttccgcgcccgttttaataaaggagcggcctgatgcaggcgtttggcgtacttgaccgttatatcggtaagacgattttcaacaccatcatgatgaccctgttcatgctggtgtcgctctccggcattatcaagtttgtcgatcagctgaaaaagtccgggcagggcagctacgatgcgctgggcgctggtctctacaccatcctcagcgtgccgaaggacatccagatcttcttcccgatggcggcgctgcttggcgcgctgctggggctggggatgctggcccagcgcagcgaactggtggtgatgcaggcatcaggtttcacccggctgcaggtagcgctggcggtaatgaaaaccgcgatcccgctggtgctgctgaccatggccatcggcgagtgggtggcgccgcagggcgaacagatggcgcgcaactaccgtgcccagcagatgtacggcggctcgctgctctcaacccagcaggggctgtgggcgaaagatggccacaactttgtctatatcgaacgcgtaaaaggcaacgatgagctggggggcgtcagcatctatgccttcaacccggagcgtcgtttacagtcggtgcgctatgccgcttcggcaaaattcgatagcgaaaataaagtgtggcgtctgtcgcaggtggatgaatccgacctgaccgatccaaagcaggtgaccgggtcgcagatggtgagcggcacctggaaaaccaacctgacgccggacaaactgggcgtggttgccctggatccggatgcgctgtcgatcagcgggctgcacaactatgtgaaatacctgaagtccagcggccaggatccgggacgctaccagctcaatatgtggagcaaaatcttccagccgctgtcggtggcggtgatgatgctgatggcgctgtcgtttatctttggcccgctgcgtagcgtgccgatgggcgtgcgggtggtgacggggattagcttcggctttatcttctatgtcctcgaccagattttcggcccgctgaccctggtctacggcataccgccgatcatcggcgcgctgttgccgagcgccagcttcttcctgataagcctctggctgatgatgcgcaaggcctagcgggtaagcctgaaacgtaagccccctcagcgatgagggggcttttttttagcgcttgcgtccgcccagcaggctgcccagcatgccgcggacgatctgattggtgacctggcgaaccgcgcttttcgctgcggtctgcacgataccgtcgcgtttaccgcctcgcgggccggtgctgccgaacaggatatctttcaggccgccaagcagcccgtcgtcatcgccgttctgctggcccttcgccggcggagccgactgctgcccggtggcgacctgcaccccttgctgcagcatttcgaaagccgactcgcggtccacctcctcctcatacttaccgtacagcggcgagtggttcagcagaccattgcgctcgtcatcgctgaccggccccattcgcgaacagggggcgataaccatcgcccgctcgaccaccgacgggctgcctttctcatcgaggaaggagatcagcgcctcgccggtgcccagctcctggatcgcctgctcggtactgaaggccgggttggcgcgcatggtctgggcggcggttttcaccgccttctggtccttcggcgtaaaggcgcgcagggcatgctgcacgcggttgcccagctggccgagcacggcgtcgggaatatccgccgggttctgcgagacaaagtagacgccgacgcccttggagcggataaggcggatcacctgttcaattttatccagcagcacctgcggcgcgtcgttgaacagcagatgcgcctcatcgaagaagaacaccagcttcggtttatcgaggtcgccggcttccggcaggcgctcgtagagctcggagagcatccacagcaggctggcggcgtacagcttcggcatctggtagagcttttcggcgctaaggatattgatcacccctttaccgctggcatcgacgcgcatccagtcggcaatatccagcatcggctcgccgaagaagtgctcggcgccctgttgctccagggtcaacagcccgcgctggatggcgccgatcgaggcgctgttaatattgccgtactggttctggaaagacttggcgttatcgccgataaactgggtgatggcgcggaggtctttgaagtcgagcagcagcaggccgcggtcgtccgcgatgcggaaaataatgttcagtacgccgctctgcacttcgttgagattgagcaggcgcgccagcagcagggggccgagatcggagaccgtcgcccgcaccgggtggcccttctcgccaaagatatcccagagcaccaccgggttggcgtgcggctcccagtcgctgacgccgatcttctccagccgcgcctgcagtttctctgagctctgccccgcggcggcaatgccggtcaggtcgcccttgacgtcggccataaataccggcacgccaatctccgagaacgactcagccagcttctgcagggtgacggttttaccggtgccggtcgcaccggtgataagcccatggcggttggccatcgcgggcagtaaatagagcgcgttatccagcgtgcgcgcaatcaacaggggtgagctcatggtcgattcctccatttatcctgcgacgattataggcaacctcgtcgtccggcgttgggaaaatcgtcacgcgccgcgcacgctgtaccgtgagggtctcaggcgcagtggcgctggatgagcgcgatgctctgctcaatttcgcgctcgatatccgcttcgctccattgcgccagctcgggggcgaagggctcaaaagcgtacaccccctgatagccgcgggcttccagcgctttaacctgctcgcaggtgccgagacgatcctgcggggttagcatgatgcgctcggcatcggtgagctgctcgcgcggacggctatcgtcaactcctgaaaggtgcaccagcccgatatccgccacctctacctggctgaactcgtccgccgcctgcgggtaaagatggtgatggaaggtatcgatcagcagcttaaacggcacgcgggcgtcgtggatcagcgtctgcgcctggtgcgcagaacgcagcgagctttgcgggaagcccagcggctccaccaggccgtggataccatagaaggcgaacagcggcgccaggtcgcgtagggcgcccagggtttcgctggccggcacctcgctgccgtcgttgagcggacagagcaccagcgatttggcgctgatggcctgggcctctttcagcagcgattcggtcaactgccgcacctcttcgctacgacggttaaaggggtagaccgcgttaatcgtcaggatctcgatgtggtagcgcgccgccagctcgcgcacctgctgatggctcagatcgtcggtcacttttccactgggtaaatcgttgcgcagctcgaccttattcaggcccagacggttcaccagacggaaaaacgcttcaatgctgagcgctggcgcgattttgcggttaatacaaaaacgttgcattgcgatggccataggacactcctgacggaagagggggtaggttcgttcaattggctaacagtcaaaacgtttattccaaaattagcaagaatggaaatgatgaatgtttgagctgtctcgcaaaatatcaccggcaccgactaccggcgcgacagcggcgggaagcctggcgtcgagggcaacgaggcgcgatgcgggaagcgcacaggcgaccggttagcgcaaaatgcgactgttatcaccaaaatgaaatttcatttcacaacaatgttgaaatataaatttcattttactacggttatagcacagcagaatcagcgacgggccggtgtgcgctggcccccttcactatgaggcgagaacatgacgatcacaggaaactttattggcgggaaaaccgttatcagcagcagcaacgaaacgatgccggtgtacgacccggcgacgggcaaagcggtgcgcgaagtcacggtgtcaaccgcgcaggaagtctccgaggcgattcaggttgctcgcgatgcgtttgacagttggtcccgtaccacgccgctgcgccgcgcccgcgtgctgttcaacttcaaaatgttgctggagcagcacgtggaagagctggcggggatcatcgtcagcgagcacggtaaggtgtggtcggatgcgctgggcgagctgacccgcggtatggaagtggtcgaattcgcctgcgggatcccgcacctgattaaaggcgaatactcctctgacgtcggcaccggcgtcgacagctactcgttgatgcagcccctgggcgtggtggcagggatcaccccgttcaacttcccggcgatggtgccgatgtggatgttcccgctggcgctggcctgcggcaacagtttcgtcctcaagccgcccgcgctggcgccgacggccgctgtgcgtctggcagagctgctgaaagaggctggtctgccggacggcgtgtttaacgtcgtgcactgcagcaatgaagatgctgagcagctgtacactgacccgcgtattgcggcggtgagcttcgtcggctcctccggcgtggcggagtatatctataagaccgccagcgcccacggcaagcgcgtgcaggcctttggcgccgcaaaaaaccacgcgattgtgatgccggatgccgatctcgacgctaccgttaacgccattatgggcggcgcttttggctccgcaggcgagcgctgcatggcgctgccggtggtggtggcggtgggagatgaaaccgccgacaaactgatcgcccgcctgaagccgctggtggaagcgctgaaagtaggtccgggctgcatgcgcggccaggaagagaacgagatgggaccggtggtgtctgatacccatcagaaaaaagtgctcggctatattgataaaggcgaaagcgaaggggcaaaactggtggtcgatggccgcaaactgcgcgtgccgggttacgacgcgggctactatgtcggcggcaccctgttcgatcacgtcaccccggagatgaccatctggcgcgaagagatctttggcccggtgctggggattgtgcgcgcggcggactatgacagcgcccttgagctggtcaacagccatgagtttggcaacggcagcgccgttttcaccagcaacggccacaccgcgcgtgaattcgtccacgacgtgcaggcggggatggttggggtgaacgtgccggtcccggtgccgatggcgttccacagcttcggcggctggaagcgctcggtgtttggcgcgttgaacgtccacgggccggacggcgttcgcttctacacgcgtatgaagaccgccaccgtacgctggccggcagggcagcagaccgtatctgaattcagcatgccgacgttaggttaatcggcaaaggagagcgccatgtcgttactggctaaatcgcgaaaagagggacagatccagcatattacgccgcaaagcgccggttggcgctatatcggctttgatgtctggatgttgaaaaaagggcagaccgtgacgctggagagcggcgatcgcgagctgtgcctggtgctgatcgctgggctggcgtcggtgaaaacgcaacatgccgatttcccgaatctcggtaaacggatgtcgccgtttgaacgcaccccgccgtggtcggtctacgtcccgccgcaggataaagtcgaggtgactgccgattccgatctggagctggcggtatgcagcgcgccgggcaaaggcagcttcccggcacgcctcattcggccggaagacgtcggggtagagcaccgtgggaaagggcgcaaccagcgtcgggtgcataatattctgccggacagcgccgaggcggactgcctgctggtagtggaagtctacaccgacgagggggccaccagctcgtggccgtcgcataagcatgataccgcccagccgggcaaagagacgcagctggaagaaacctactatcaccgcttcgatccgccgcagggctttgccttccagcgggtctacaccgacgaccgcagcctggacgcctgtatggcgccctacaaccacgatgtggtgatggtgccgcgcggttaccatccggtggcagcgattgcaggttacgatagctactatctgaacgtgatggccgggccggatcggaaatggttgtttacctgggaagatgaccacgcctggatcaacacgccggagtatccgcgccacgactgacgcgcggtgcagaagcggataaagaaggccggttagcgatgctaaccggccttcctgtttgagggcgacgggtgttttttcgcgaaacgctccgcggaatcccactcccgacccggcaagcgcagcgccgccggggaggacacctccggcgccatacccgcctttgtgccggatggcgctacgcttatccggcctacgggaggatcccgtaagcccctataccccaggcccggcaagcgcagcgccgccgggcgatgaccacaggcacggcgctgcttttatgccgggcggcggctcacgccttgcccggcatacggttcgtgcgacctgccgttaatttattcaccattgttgctgaaactgccggtgttgcggcctcaaaatcgctgagacgttcccggaaggccggggcagcccgcatggatgcgggctgagggccgtgttttgcacggatgctgcctcggcccgacccgaagcctgcagggataagtcgaagggaccgcgtatcggcgattttgctggccggagcccgggggtacagggggcggcggcgactggccgccccctgtgcgctccctgcgccatgacaggcataacgcagaagattaaccgggagcgcaatgtgcgctgaaatcacatgcgacaaacgcttttcccagattaatagagttgcataccaataacattatatccggcaccccgcaggcgcatataccccaggcccggcaagcgcagcgccgccgggcaggacacctccggcgccatacctgcctttgtgccggatggcggcttcgccttatccggcctacggcatcctcccgtaagctcctataccccaggcccggcaagcgcagcgccgccgggcaggacaccgcagacaccatacccgcctttgtgccggatggcgctacgcttatccggcctacgggatccttccgtaagcctatactgcgccgccgagtaacaaacgccaggcagcctatctcacgccttctgcttggcctcggactcctggctgctgttcagcgccagcgagaccgccagcgtctgggccagacacagggaagcaacctgcgaacggaagccatccacctgcgcttcacgcaccacaaagcagacatcgctgaaggccgccagcgggctgacctggctgtcggtaatggcgatctgccgcgctttgcgctgcgcgcccagctccaccagctcgaccacttcccgggcgtacggcgagaagctcaccgccactaccacgtctttcggaccgaccaggctcagctgctcggtgaacatgccgccgaggccgtcgatcagaaaggctttgcgatcgaggtgacgcagcgcataggtcagataagaggcgacgctaaacgaccggcgcagaccaatgacgtagatattttccgcctcgcccagcagggccaccgcgcgctccagatcatcgctggaggtctgcatcgccagctgctgcagcgcctggttgttcaccatcgtgaacatattgaggatttccgttggcgtttccggcgggctggactcatcgctggtggtctggcggaaaagacgggcgcgctcggtatagttggcggtctcttccatcaaatgttgcttgaacatctgtttcatttcgttaaagccgctgaagccgaaggcgttggcaaaacgaatcaacgtggaagggggaacatccgcctgttgcgcaatggaggccacggtatcgaaagccacgctattgctgttatcaaggatatagcgggcgacctgtttcaggcgtttgcttaacgtatcgtagcgacgcctgatttcatcctgcaggatggtcagctgtgttgggttattggccataaagtgcgctctgagaaaatggaaggaatatggcttccagtgtaccaaatgaagcgaatttttcatttattgcgacgaaatacgcgattcatttcacgaagaaacagaaaaacgcccgctccgcaaggtgacggagacgggcgtcgggggatcagcggcgggcttcgcgccagtagccaataagcgtcaggtagttgcgtttcacttcctctatcagggcctcatcgctgagctcaccctgcatccagcgccgcgacggctggccaaagatggtgcgcccgacggcgaaacctttgatcatcgggtgtgcggccgcctcggcgaaaccggcgcgcagtttgtcggaaggcgcgtcaagcccgaggatcaggatcccgcggctccacggatcttcacgctcgataagcgcggtgatctgctgccagctggcgctggagagcggcggcagcttccaccagtccggcttgatccccagctgatagaagtgttccagcatggtgtggtaatggcgctcgtctttgtccgggccattttccggcaggatcacctccagcagcagttcatggcctgacttgttacaggcctgccagacctcgagcagcagggcatcctgctctgcacgcagcgccgccgggtcgtccgggtgatagaagaccaggcatttgacgacatgctccagcggccagtcgatcagctgcgagccgatgttgccatgctccagacgcagcggtcgcgagctgggcagttcgatagggcggccgatccaccagcccttgccggtaatggcgttgagcgcacgctggccgtaggtgccgtcggccagaatgccgctgcgctgatcgagacctgcctcctgcgccgccgcttcggccgcggccaacaacagcagcttgagctgcggaatgcaggcttcgtcgcgcccggtctcccgcgccagatcggccagctgtttacgatggtcaaaggcgaaaatgcacagctccggccactgctgacggcggctggtgacccggtgcaggtggttgaggcgctcgtcgacgtccgggcgcggcaccgattcggcgcgctgcaggtagtcgtcgagttcgactttggtcggcatcgccggcgcgcagccgtggcgggagaccaccagcgccccgcaggcgttggcgtaacggcaagcctgctcccagccttcgtcgttgagccagccgcgcagcagacccgacataaaggcatccccggcgcccagcacgttgagaacctccacgcgcacgccctgctgtagcggcacctggtcccagctgtccgggatgtcgccttccagcaccacgcagcccatcggcccgcgcttgcagacgagagtggctttggtggcattgcgcacatttttcagcgcggtcagggtatcggtgctgcccccggcaatatgaaactcttcttcggttccaaccaccaaattgaacagatgcagcacttcctgcagctggctggtgaccggtccggactcaatgaaacgggtttcgccatcgccgagcgaggtgagcccccacagcaccggacggtaatcgatatccagcgcggtacgcaggccgtgacggcgggcgtactccagcgccttcagcaccgcggcgcgggtgttggcgtgcgacaggtgggtgccagtcaccgccagcgcccgggaggaggcaatatactcctcgctaatgtcgtcaggagttaaggccatatcggcgcagttatcgcggtagaaaatcagggggaaggtctcctgatccttaatccccagcatcaccagcgcggtcaggcgagatttgtcggtaatcagatactcggtatccaccccggcgcggttgagcgtttcgcgcaggaaacggccgttgtgttcatcgccaacgcgcgccagcatggccgatttcagcccctgaatcgcggtgccaaaggccacgttgccggaggagccgcccagatatttcgcgaaactggcaacgtcttctagccgcgaaccaatctgctgggcatagaggtcgacggccacccgacctatacagatgacgtcgagccgctttactgctgcattcatagctaggatttcctttttggtgtctgctgcctggaagggtcgggatcccgacgtcgactccgtgaacagcctgagggttattggttacccttagtttgagaaataaatatttcatttgcaaactcgttcgaaattaaaaaaccaaaagtgtgagggatctaccactctgccgcactgagcctcgcgcgagcgcggatcgccccctctgtcgacccgggggaaaatgaaacgccaaatggcatccatttacctatgatttttaaggggatattgccgtctggtgcggcaaaaaagggcccgaaaacgtgtctggaatgtaagtgaaacgtatgaaatgggtagagagtttgatccttctcgcaaaatgaaatatttcttctgtatttgtatttaatgaaaaaaatgtttgcctataatccacaggtattccagtgacgtgaacgacggccccggcggcatcggcgcgacgccacacacaaatactgaacaataaggattgtgcatcatgggcaaactgagactgacaacggcgcaggcgctggtgaagttcctcgataaccagtacctggaagtggatggcgtagagctgaagttcgtgaaaggcattttcgcgattttcggccatggcaacgtcctggggctggggcaggcgctggagcaggacagcggcgatatgcgcgtctatcaggggcgcaacgagcaggggatggcccacgcggccaccggttttgcccgccaggccctgcgccggcagattatcgcctgcacctcctccatcggtccaggggcggccaacatgatcaccgccgccggcaccgccagcgccaaccgcatcccactgctgctgctgccgggcgatgtcttcgccacccgccagccggatccggtgctccagcagattgaacagagctacgatctcagcatcagcaccaatgacgccttccgcgcagtcagcaaatactgggaccgcattacccgcccggaacagctgatgagcgcctgcatcaacgccatgcgcgtcctgaccgacccggcggaaaccggcgcggtgacgctgtgcctgccgcaggacgtgcagggcgaagcctgggattacccggaatccttctttgcgcgccgcgtgcaccgtctcgaccgccgcccggccagcgccgcgcagctggcggacgccgtggcggccatcaaagccagccgtaaaccgctgatcgtctgcggcggcggggtgaaatactccggtgcgggcgaagcgctgtcccgtttcgccgagcgctacgggatgcccttcgccgaaacccaggccgggaaggggacggtggtctcgtctcaccccctgaacgtcggcggcgtcggcgaaacgggctgcctggcggcgaacctgctggcgaaagaggccgacctggtgatcggcgtcggcacccgcttcagcgattttaccaccgcctcgaaatggattttccagcacccggaggtgcgtttcctgaatattaacgtcagcaacttcgacgcctggaagctggacggcattgccatgctggcggacgcccgggaagcgatgaccgctctcgacgcggcgctggcggacagcggctggcaggccggctggggcgcgcagatcgagagcgtgcagagccgtcagttaaaagagacccagcgcgtctaccaggcggtgtggcaggagaaatcctttgtgccggagatcgacgatcacctcgatcgcgaatcggtgtatcgcgagttccgccagatcaccgactccaccctgacccagagcagcgtccttggggtactgaatgaaacgctgccggccgaggcggtgatcgtcgcggcggcgggcagcctgccaggcgatctgcagcgcgtctggcgcaaccgcgcggaaaacacctaccacgtggagtacggctactcctgcatgggatacgaagtcaacgcggcgctgggcgtgaagctggcgcagccgcagagcgaagtctactccctggtcggcgatggctcgttcatgatgctgcactctgagctggtcacctctctgcaggagcgggcgaagatcaacgtcgtgctgttcgacaacatggccaatggctgcatcaacaacctgcagatggagcacgggatggacagcttcggcaccgagttccgctaccgccagccggaaaccggccagctgcagggcggcctggtgccggtggacttcgccaccatcgccgccggctacggctgcaaaacctggcgcgtcaccaccctggacgaactgcgccacgcgctggacgccgcccgtcgcgaaacggtcagcaccctgattgatattaaagtgctaccgaagaccatggtgcacaaatacggcagctggtggaacgttggggtcgcccagacggcgctctctgagcggatccgcaaggtggcgcaaatgattaatgaaaagcgcgcccaggcgcgtgattactaaaacgaacctctaccctgaatcctacagacttacggagaaaaccattatgtcgctcaaattaggtgtcatcggcgctggcgctatcggtaaagaacacatccgtcgctgcacccaggttctgcagggcgccaccgttgtggcggtgtctgatatcaatgccgacaacgcccgcgcggcggtcgcgctgccgggcgtgcaggcggaagtctacgccgacggccacgacgtgattaacgccagcgatgtcgatgccatcctggtcacctcctgggacccgacccacgaagagtacaccctggccgccatcgccgccggtaagccggtattctgcgaaaaaccgctggcgatgaccgcggaaggctgccgccgcatcgtcgatgccgaaatgaaggccggccgtcgtctggtacaggttggctttatgcgcccgtacgacgaaggctatctggcgctgaaaaaagtgatcgacgatggcgatatcggcgcaccgctgatgctgcgctgcgcccaccgcaaccagtcggtcggcgagaactacaccaccgatatggcgatcaccaacaccctgatccacgagctggacgtgctgcgctggctgctgaacgatgactaccgttccgtgcaggtgcgcttcccgcgctccacctcgcacacccatgcgcgcctgaaagatccgcagatcgtctcctttgaaaccaaaaaaggcaccctgatcgacgtcgaggtgttcgtgaactgccagtacgggtatgacatccagtgcgaagtggtcggcgaaaccgggattgcccgtctgccggagccgtcggccgtccagatgcgcaagtccgccagcctgtcgaccgccattctcaccgactggaaagaccgctttatcaaagcctacgacgtcgagctgcaggcctttatcaacgacgtcaaagccggccagctgcacggcccgtcggcctgggacggctacgcggcgtcggtggcggcggacgcctgcattaaagcgcagggaaccagcgagccggttgaagtgacgctgcctgagtgcccggcattctacaaacgttaagcacgttttgctgacggaacttctttgcacaggtaacgacgatgaaaattgcttttgatgtggatgtcattaaggacctcgggatcacccgcatggtccatcaggtagcggagtggggctacaagtacattgaacagtcgccgcacccgcagattaacccgttctacaagcacccgcgcgccagccgggagatcatggcggagtacaagcaggcgctgcgcgataccggccttgagctgtcgtcgtttatctgcgtctaccgctggtccggcccggacgaactgcgccgtcaggcggcggtgaaaaactggaaacggctggtggaaattgcggtggagatgggcgttcaggtgatcaacaccgagttctccggcgatccgaatcagcctgagatctgcgatgaaatgttctatcgctcaatggaagagctgttgccgatttttgagcgggaaggcatccgcgtggagatccaggcgcatccctgggatttctgcgaagagaacaatgaaaccgtcgatattgtgaagtcgttccgcagcgataacgtgaagtacgtctacagcgtgccgcacacctttttctacgacaaaggcgtcggcgacgtggcgagcatgctgcgctatgccgggagcgatctctcccatgtcctgattgcggatacccgcaatcatacgaaacattgccgctatatcgttaacccgccgggcgtggatgccgtggtgcaccagcacgtaggcgtcggggaaggggatgtggatttcgacgcgctattccgcaccctgcgcgaaatgaaattcgccgagcagaccttcaaggtcggcggggagccgattgtcgccacctcgctgtttggctacccggaaaaaatgaaataccaggcagtggaaacccgtgaacttattgaacgtgaattgctgcgccggtaaggcgcagcggcaggagccctactatgaacaaagataacgtcaaactggctatcgccccaatcggctggactaacgatgatatgccggagctcggcagcgaaaacaccttccagcagatcgtcagcgaaatggcgctggccggctttaccggtagcgaagtcggcagcaaatatccgcgcgacccggcggttctcaagccgatgctggatattcgcggcattcagatctgcaacgcctggttcagcacctttttcgccaacggccaacgggaaaaaaccattgatgaattcgtcaatcacatgaacttccttcatgcgatgggcgcgaaagtgattggctgctccgagcagagcggcagcatccaggggctggataaaccgatcctcggcgatgcgaagccgtgcttcagcgaagaggagtggcagcgggtagcggaaggctataacaccctcggccgcctggcggcggagaaggggatgcaggtctgtctgcatcaccacatgggcaccggcattcagaccaccgcggaaatcgacaaatttatgtcgctggtggacgagcgcgtcttcctgctgttcgataccggccacgcctggtattccgaaggcggcgaagcgccgatgctggcgatcctcaaaaagtatctgccgcgcatcaaccacgtccatctgaaggacgtccgcccgccggtgatcgaccaggtgcgccgcgacggcctgtcgttcctcgacggcgtgaaaaaaggcaccttcaccgtcccgggcgacggggtgatcgatttccgtccggtgttcaagctgctggacgactttggctataaaggctggatggtagtggaagccgagcaggatcctgctctggccaatcctttcgaatacgccgtcaaagcgcgcaaatatatccgcgaaacggcagggatctaatcgttgtgacattttcaggccataccgggtatggcctgctttttttccttcctcaaccggacccagggctcaaccacggcgccggacagttccctctcccgggcccagggcttaaccacagcgccggacagttccctctccctcagggagagggccggggtgaggatgacgatgacgggtaaagcgtcacttcacttccgccagcgcggtcttatccacataaggtttcatcagcgcgtcggcttccttctgcgccgcctgcaccgccgcttccggcgtcactttggcatcgttaaccaccgccgccagctggttctccatcgccttacgcaccgccacggtctcccaggtggagtaccacggatgggcgtacttcagctgctcaagggcgatcgccgcccgcggatcctgctgcagataggccttcatctccggcgtatcgtatgacgccttgcgcggcgagaaatagccggtgaagcggctccacgcgccgttcacctcggggctcaccagataggtcaggaactgatacgccgctttcttctgcgcgtcgttgatgcctttaaagctcaccaggctggcgccgccgatcggcaccgcgcgctgctctttggccggcagcatcgccaccccaagctcaaaatctttgctgttctcgcgcataaagcccagcgcgccggtgctgagcatcgccatcccgagcttgccggagaagaacgcggcgctgatctgcttcgagttcagcaccccggacggcatcaccttgtccttgtagatcagatcctgccagaagcgcagggcgccgatggcggtcggcgagttgtaatagacctcgcccggatagtcttcgttaaagtatttcccgccgttggcgcgcaccagcgccgagaagatccagccgccgtagtcgtcgttggtcgacggcagcatgatcccccactggcctgtgctctcgtcggtcagctttttggcatcggccagcagcgcggcccaggtctgcggcggctgtttgatcccggcccgatcgaacatcgtcttgttgtagtagaggatcggcgtcgagttatggaacgggatcgcataggtggtgcccatcacctgggcgttcttatgcatcgcgggccagaattccttttgcagaaaatcgccggccttctgatcgccatatttaaacagctcatccatcggcaggatctcatccttcagcgccagatcggtggtgaagttagcggacatgatcaccagcgccggcggctggccggccttctgcgccgattcggctttgatcttggtggtgtcgtagttgccggtgaagatgccgcgtacttcgacatcctgctgcgagtcgttgaattgcttaatgacgcgggtcatctccatggtcagcttgccgtccaccggcgccgggaacatgaagtctattttctctttcgccagcgccgcgccgctcagggcaagactgaggccaaccgcgactaccgtaaaaggtttaaacatgatctgtctccatcagtaaattatgctgggtctcagcatgaaaaagatgcacatcggcaggcgaaaagccgatcggtagcgactcgcctttctccggcaccgtgccgcggtggcggcggctaaagcgcagggtgccgatcggggtgctgacgtggagcaggtagtcggcccccatcagttctcgttgcagaacggtggccggcaggcgcagatggccctcctccacgcggtcggtaatatgttccgggcgaacgcccagccagacgcgggtctgctcccggtggcgcggcggcaacggatggcgctgttctcccaacagtacttcaccgttggcgcagggcagcgacagcaggttcatcgccggcgaaccgataaacccggcgacgaacaggttggccgggttggcgtacagatactccgggcgcccgacctgctgcacgtggccgccgttcatcaccacgatgcggtcggccatcgacatcgcctcggtctggtcgtgggtcacatagatggtgctggttttcagctgctgatggagggccataatgctgtcgcgcacttcgctgcgcagacgggcgtcgaggttggagagcggctcgtccatcaggaaaagccgcggattgcgcacgatcgcccgggccatcgccacccgctggcgctggccgccggagagcttcgccggtttgcggtcgagcagcgcctccagctgcagcatctgcgccacgttgtccacccgcggctgccagctgcttttctcttccttgcgcaccttcatgccgaaggtgatgttgtcgcgcaccgacagatgcggaaacagggcatagttctggaagatcatcgcgaagtttcgctcgcgcggcgtggcggcggtgatgttctcatcatgcagccagatttggccttcgctaaccggctccaggccggcgagcaggcgcagcagggtgcttttcccgcagcccgacgggccgaccagcaccacgaattcgccttcgtgaatatccagcgacagggcgctgagcgccggcttgccgtcgaaacgtttactgatgttttgcagactgagcatggcggttagcgctcttccgttgggcaactgatgttttcgtcgtacagccacggcccggcgtagtgggccagcgagtgctggtagctcacccactgctcgccgacctggcggtgcatcaggcatgaagccggggagaggtcgtaatagggccgggtgtcttcgtggcagtacggcacctgatggacggtgccgggaatggtggagatcagcgcctggcgatactgggtcatggtcaggctgtggttatggccgcagaagatgcgcgtcagcgacgggaaacgctccaccagcgccagcagacggtggccgttttcgcaggcgatcgggtccatctgcgcattgcccagcggcagaggtgggtggtgcataaagattgtcgccggtttgtcgccgccctcgaacagctgggcttccagccagccgatggtctcgtcggtcagccagcccttcgaggtgccggcgcggctggaatcgataaacagcaggcgggtggcgaagtcatccaccgcatagcgcatattttgcggatcgttgcccagctgcgggcacagcgggtgaagatgctcgagaaaatgggctttgtcgtcgtggttgccggggatcagatacagcggatagttcaggctgccgaggatctggcgggccacctgatactcctccgggcggccgcagttgacgatatccccgctcaccaccaccgcgtccgggcgctcgcgcagcgcgttaagctgggagaccacgtcggcgttggcggcattgacgtcgataaagccgtacagcttctcgccgcggctgcggaaatgggtatcggaaatgtgcgctaacagcatgaatcactccttatttgatcccggagaagccgaagctccgcaggaactgtttctgaaaaaggatgaacgccagcatcagcggcaggcagaccatcagcgtcccggcgccgatggtgccccactggccgccggattcggcgcccatggcgaaggagaccagcccgacggtcagcacctgcttatcgggatcgttgagcatcatcagcggccacaggtactcgttccagtggtaggtaatgctgacggtggcgaaggccagcaccgacggccaggacatcggcagcagcacgcggaacagcacctgccaccagcggcagccctccatcagcgcggcctcctccagctctttcggaatggcgaggaacgcctgacgcatcaggaacacgccgaacgccgaggtgaagtagggcatcatcaccccggtgagggtgttgagcaggccgaaggttttcagggtcagcatgttcggcaccatcatcaccaccggcatgatcatcagctgcaccaggaacaggagaaacagcgtctgcttgccgcgaaactcgtggcaggcgaagacgtacccggcggtggtgatggtcaacagttgcacgcagaaggtgccgaaggtgaagataagggtgttggcgtacaggctcagccagtcggcgctgttccaggcgtcgcggaagttatcgagggtcagcggcaggcggggcagaagcgacgccatatcgtcgccgaaggtggtagcgctgaacgaggtcgccagcatccagataaacgggctgacccacagcagcgccaggcagcacattaatactgtgagcgtaaagggcgacgagcggcgcaggcgcagccacagcggacgggcggcggcgggcgtgcggaccagcagcggcgagatttcagcgctcatagtgggctcctttctccagcagtttcaggttaatcagcgagaaggcgaacagcccggccagggtgaggaaggtggcggcggaggctttaccgaggtcgtgggtatcccaggcgagattctggatgtaatagagcagcacggtggtggcgttgtccggcccgccgcgggtcatcaccgccacgtggtcgatctgggtgatggagtagatcagcgcggtggtgatcacaaagctcagcgtcgggcgcagcagcggtagcgtgaccttaaaaaagacctgcgtgcgggtagccccctccatcagcgccgcttcccgcgtcgaggacggaatgctctgcagcccggcgaggaaaaacagcatgtagtagccggcgaacttccacacgccgatcagcgccagggcaagcagcgcgctgttgctgcgccccagccagttgttgttcatcggcccgaacagcttcgccagatagtggtcgagcaggccgaggccgggcataaagataaacaaccacagcgcggcggcgctgaccatcgggataatcatcgggaagaaaaaggcggtgcgcagccagcggttgacgcgatggttctcgctcagggcgaccgccagcagcagggcgagggtcaccccgggcaccaccgtcagcaggatatagagcaggttattgcccagcgactgccagaagacgttatcggcaaacaggcgggcgaagttatccagcccgacgtactgtgcgccgtcgctggccatgcgggtatcaaacaggctgtcatacaccgaacgccccagcgggaaccaggtaaacagcagtaaaaacagcagggaaggcgacaggatcagccagggaagccaggtctttctcatggtgacgcgcatctcgttcagccatttatcgaagcccggattgtgggaagcaatgactacagaggcatggcggggagatgacggtttgatgaagcgacggggaaaacgccgggcgagcgggccgcccggcgggagagaaggatcagaagtcggctttcagcaccgcgcggtagcgggctttgccttcacgaacgtgcttcagcgcttcgttaatctgcgacatcgggaacagctcggtggtcggagccactttgctgcgcccggcaaacttcatcagcgtgcgcagttcggacggattaccggtcgccgagccggagatgctgcggtcgccgccgatcagggtaaaggccggcaccgggaacggcttcatcaccgcgccgacggtgtggaagttgccgccgtaagccagggcttcgaagtacggctgccagtcgaggtccaccgccacggtgttgatgatcaggtcgaactgaccggccagcgcttttaaggcttcaggatcgcggctgttgaccacgcgatcggcgcccatcgccagcacttcctgctctttcgccgggttggaactgaaggcggtcacttccgcgcccatcgcccgcagcagcttaatggctatatggccgaggccgccgatgccgatcaccccgacgcggctggtggcggtaacgtggtgggtcagcagcggtttaaagacggtgatgccgccgcacagcatcgggccggcggacgccagatcgatgctctccggcagggggatcacccactgccagtcggcgcgcagcttattggcgaagccgccgcgattgagaatggtcggcaccgagccttccagacagttgatctggttgccgctgatgcaggcgtcgcaatggccgcagctgcgcgccgtccagccgatgccgaccttctggccaatcttcagccctttatcctgcgccgcgctgcccagcgccgccacccggccaatcacctcatggccggccaccagcgggtagctcgacatcccccattcgttgtcgatcatcgacaggtccgaatggcagatcccgcagtattccacttcaacttcaacatcttccggctgcagctcgccggcatcgtattcccacagcgacagatcggcgcccgcttctttggcggcgtagcttttaatgatgctcatgttcatttccttggggttggcgtgataacccagaaagtgtagagcatggtattccccggcgcttggcaatcggaggggtcgcgaagcgggcggaccagccgcccgttaaggtcagcggctggccagcggccactgattaaggcggatgccgcgctgcggggcgttctcggcaaaatcatccagcaccgcccgcacgtccgggtcgagatagccgacgctgtcgtgctcgacgatcaccacgctcttttccggaatcttcgccagcagggccagcagatgcggattgtgcataaaggtcagattctgctggatgcgcagcacgtagtggtcatcgtagcgcgccagctgcagcgagtggcgatggctgcgccagaggctgaacgccatctgggtggcaagaccaatcccgatccccgccagcatgccgaaggcgataatcccgccgatggtggcgaggaacggaacgtactgcgccgccccctggcggaactgctcgatgaacagccgcggggtcgccagcttatagccggtatacagcagcacggcggcgaggctggcgagcgggattaaggttagcagaccgctaaaccacaggccgcagatcagcagcagcacgccgtggataaagatcgacagtttactttgcgcgccattgctgacgttcaccgagctgcggacgatcaccgcggtgatcggcatcgcccccagcacgccggagagcaggttgccgacgccctgggcgaccatttcgcggttcggcgaaggcggcggattttgcgggcgcagctttttcagcgcctcctggctcagcagggtttcgaggctggcgaccagcgccagggttaccgccaccacccacaccgacggattgcgccacgcgttccacaccggagattccagctcgcccagcaggtcgccgaggctgccgaacgccggcagggtaatacgcggcagagcggccagctgctgcggcgcaaaatgggtcagcagcagggtggtcacgcagccgagcaggacggcgatcagcggcccggggatccagcgcaggctcttcacccggcggataagcggcgagccccacagccagagcacgagcaggccgcccgcggcgacggcaaacgcagtgacggagaaagcggcgttgccctgaaccacttcggcaagtccggtctcttccgccgtgccgagcgcgacggggatctgctgcataatcagcaggatgccgatcgccgccagcatgcctttgatgacgctggcgggaaccagcgagataaagcgcccggcccgcagaatgccgaacagcagctgcagcacgccggccagtaccagcgccatcaggaagagggagaaggaacccagggattcaatagcggcgacgacgatggtgaccagtccggcggcggggccgctgacggcgaagcgggaggggctgagggcggtgacgaccaggccgccgatgatgccggtcagcaggccgacgaagggcggtaagccgctggcctgggcgatgccgaggcacagcggcagggcgacaaggaagacgacgatgccggcgagagagtcctgacgaaacgtattcatggggcgtgctcctgcggtgagaggtgttcgacgagggtggttaagtggccggaagccaggtcgtagacgcagccgtgcaggctgaggggccgcccgctggcgagcaccgtttgcaccggctcactctccagcagacgggcgaactgggcgcgaacgttggcttccaccagggcatcaagggcacggcgagagggctccgcgtcggaactggcgctggcgccgggggaggcctcaacaccacacccatcggcgatctgcgcaatttcgtgatgcagggtgcggcgcaactggccgatgcggcgagccagcgccgaggattcctgcgccagcggcagagtgggcagggagagcgccgcctgcacgccgccgcagccgtagtggccgcagagcaccacccgctccacctcaaggtagtcgagggcatactgcaggacgctcatgacgttgtcgtcggcgggatcgagcatgttggcgatattgcggtggacaaagagctcgccgggctggctgccggtgagcacctcggcgggcacgcggctgtcggagcagccgatccacagcgagtggggccgctgcccgtcgacccatttttcgaaatagtccggatcatgctgacacttctgcagcgcccagctgcggttgcgggccagcaaaggttttaacgtcgtcacaagtattctcctgagttaattcatcgagtgaatatgtccatcaagactcgtacagcgactagtaaaaatagtgtttaccggaacccttcacgcctgaggaaaatcctggaataaacggcaaaaagaaaacttttcattaatgtaaagttataaaaatattgatgaaattaatgttttgccgcggagcggatgaataacaaaaaggcattgaataaaactttctggaatatatgggaatggtggtgggtagggttggggggaatattggggtataggcgaggggaatttatctggggaaagatgggttgtgctggggatgtggttgagagtgaggtgagaacaagttgagataagtttgagtggggtttggggttaccgggggagaaggggggctggcagggggagccgggttctcgggggagtgagaggaggggggctggtggcagtcgcgctgtggaacggtcgtaaaaggtgacgccgcgcaggatagcgctgtttttttcaacacttagcgcaatgacgacacgctgtcgcttgcatgaccgccgccgacaggtataatccagaacgtttccgcatccccttcagtgccgaagtggcgaaatcggtagacgcagttgattcaaaatcaaccgtagaaatacgtgccggttcgagtccggccttcggcaccattagtacttccaagaccatccgagaaagtccactaaagcctttaaaatcaatgcttgcagcgatttttccgtcccgagtcgtccgaggtagtccgttgaaatccggatgtcattgggggcataattgggggcatcttaacttcgattagaaatgtgcccccagatgaagctaaacgccagacaggtcgagaccgcaaagccaaaagacaaaacctacaaaatggccgatggcggcggtttgtatcttgaggtttcggccaagggttctaaatactggcgcatgaaatacagacgcccctctgacaaaaaagaggatcgccttgcctttggtgtttggcctacggtgacgcttgctcaggcaagagcaaagcgtgacgaggctaaaaagctcttactgcagggcattgacccaaaagccgaacagaaagaagctcaggctgagaattcgggggcatatactttcgaaacaattgctcgtgaatggcatgccagtaacaagcgctggagcgaagaccatcgttcgcgcgttcttcgctatctagagctttatatctttcctcatatcggttcgttggacattcgccagctcaaaaccagtcacctgttagcaccgattaaaaaagttgatgcaagtggtaaacacgacgtcgcgcagcgcctgcaacaacgtgtaacggccattatgcgatatgccgtacagaatgattacatcgattctaatccagccagtgatatggccggtgcgctatcgacaaccaaagcgcgacattaccccgctttaccctctagccggttccctgagttccttgcacgtcttgctgcatatcgtggtcgtgtaatgacacggatcgcggtcgagctttccttactaacttttgtgcgttccagtgagttacgtttcgcgcgttgggatgaattcgacttcgataaatctctttggcgtataccggcaaaacgagaagaaattaaaggggtccgttattcgtaccgtgggatgaagatgaaagaggagcatatcgttccgcttagtcggcaggcgatgattttgttagagcagcttaagcagattagtggtgataaagagctgctgtttccgggagatcacgacgcaactaaagttatgagtgaaaacacggttaatagtgctttgcgggctatgggttatgacactaaaactgaagtatgcggtcatgggtttagaacgatggcgcgtggtgctttgggtgagtcggggttatggagtgatgacgcaatagaacgccagttgagtcactcagagcgtaacaatgtgcgtgctgcttatattcatacttcagagcatttggatgaaaggagactgatgatccaatggtgggctgattttttagatgcaaataggtatgttgaagtaagcccttttgattttgcgaaaaaaaataaagcttaaaaatgttaggcctgcaagcaggcctggaattcttatttttgtttcaataatttattagcctttgacagttgtaatatgacattgtccttaaatacatctgggtattttttcaccccagtggataaaatcacctgataatccaaattgttagggttttctaacgcatcaagacatcctatcattctcttaagattatcattatcaattccaatgttttcaggtgtatctattaacaaaagtcttgggaatggtatatcatcgactaacgacatttgcaggagagtgacgaaatacaaaaatcttttgtgcacatttgcacttgcttctttgtagtcaccattattaattagtggcatataatcatctgaacttatctctgctgatctacaatcgggaagagataatttcatgaatttattatagtatttgctaaaatctttaattttttcaataagttcttgagcagcagacgcttcaagtttttcaactgctaatttagctttatccatttcaattttagaagtattcttttcatcttgataattctgcaaccgttcctctaaaattaaagcttgcttaagattacttatctgttctttcttttcgataacatgatcttcaacttcatcaattgcatcgagatctgtaatatattcaatattatcaagaacgttgcttaattcatttttcagttcagaattagtccctcttagtttttcaatttctgagtgaatattagctaattcttctttagaagaatttaaggcaatcttcatagtttctagcgatttaattttacttttgagtaatgagtaatattcactaggatcgtagaaatagcgtctataatcattttcatcaatttcattaccacatacacatttatcacttgggcgatcaacatgcttgagacagtatggacatgtatcaggagtaaacatttcaagttgtttgtgtgtatgtatgattttttctattctgcgagcatcctctttagttcttgtaatgatgtcattgatagactcaatttctttgtatttatttagagctaaattttcatacttaataagttcaatttcagtcaagctgaactcttcttttaacttttcagttttagttatcccattgttaactttatttttgattgtaatgctgttatttctgaattttataagacgctctatatcagatgctagtgaattgattttttgctttaaaaaattatcatttatgacttcattaatgcctaattgcttatgcatttcattcactatgtcataatattcgttataaagtacattagctttatcgtaattgctttgtttcctcttaagtacaccatacgcatcgtatagttgtactaaagttttaccgatgagaacttcaaatatagctttcctaagaaatacagagtcacttacataattatgatgatcggctggcttgtaaattatattcgcatcagttccttgattatgatatatcaagcgtaaaagatcattgaagcctattttaaaattcttaccagagtgaaatatttcaatagctggaatgttaagttcatttaatagccaatcagaaaaaatataatcgtcaattctatgcctatttattgcaaggcaagcaaagttaccggtattttcaccattaacaataagatcgctttttgaaaatatagttataaggttttcaccaatttttctaacaagtcgatagtgatttccattagcagatatttctaattccacaaaattagagctgtcactaacaatttctttatgtgtgactttttcactcttactaaaatgtgaaaccctacctcctaaagaatagtaaataaggtcgaacagcgttgattttccgctaccgttaggagcctcgataatatttaccttatgttcatctaaaggtggtgagctgaaagtataagtttttccttcatagtgaactttgtgtatttttaactgacccataatttaagtccatgattttcaaatatttttgtgattaaagtgtttagggttaaactattgatgcgcttgaaaatacttttgaggatatttatattgtcaaattcagattggaaaatcatcgtattaaagaatcgtgttaatatttcattatttaatatttttatatcatagcaatcaggcttgtctgtatttattaagcctattattttgtttttttctaaacttcttagtattttatatacttctcgttcatttaaagatgctttgacaaaaatgtcgaaaagaatctctttatcttctggatgtaatgtatggttttctttattattaactaatacagagattgcttttggcgatgcgatgagctgcatcaagaatgtgagttttctatgatctttgaatagcatgcttttatttgatatttccttcaaacaaatcagaatcaaatatgttaggaagtaaaaatcctctccagatatgaaactaatttgcttgattctttcttctttctgtttgttgttcatattttaatattcatcatatgctaaataacaatcatctaataggcttaaaattattcccttaatattttccctgtcattgattcttattctatatgttttctttaaatcctgtatattatcataacataagttaatcatttcgtctaaataagaattaagctcttcaatcgtaaagttacttttcgtacatattttctcaaggtattcatcacaccattcaaagattttacaacgaagtgatgcatattcttgtccaaaaataggttcgtttgcccgagagtttgttgcagacagactgagtcttgttaattttcgtgcagtaatagacttgcatacgctcaaatacttttcagtaagattacgctgatcctcagtatcaatagcggcaaaggattcccaagaaggatctacaggtttatagtcatcgttattggcagcgatctgtaaaaaaacaacttgtactttatcacgactaacaaaacggccaaatttcctttcatcctgttgagatttatcaaacaatatctcgatagcactaagtattatattctctaatccagaatggcgttgattatagaactcacagtttctaatatcatcttttacagactcttctaaatcatcgctatctgcgtcatcgataatgaaagtaataccttttataaactcccgaaaatcatcatttttccaagagactaccttgttgtaattaccgcctatataatctatagctgttttttgagtatctttgtaaaccgtgtattgcttcttgtattcttccaagaataaattacgagctaaagttatttcgttctcattcaactcaatatttgatgccagtttatttaatattttaaatctagtttgttttgctgtttgtggtgtaaaaccagggatatgattttgtatataggtgttatctagctgctcatccgaaatcttagcgtggcaaaaaatagaaaaatctatggttttattatcattgaaatatgctaagtattgatcggcaaatgctacgatagtgttttttattggatcgctattgaagcttagaccactcgaataatttttgttttcttcaattgtaatgtcaacaccagtatcttctgggaccagcgttgcagagtcttctatgaactctgttgcgcaataacatacccttgagccgttttgttttataagcctcaaaagacgttgcacagcgcgagtgcgctgaaaagataaaccacggccagatgttttacttgcttctcgatttattgttttaacattcataagcttgcaaagttaattgatttttttgatgctatcagataagtatgaaaaattgtacatgatttgattggtgagtctagtaattcaggttgtcacttaccccaaagtgacaacctacttgataggctggtatttctagattatttattgtaacgcgcgcagccccgcccgcctgcccgcttcgcttaacagactggttttcatgcaccccgtaaatcgtctcagaagctgccgcacaagggctttcgcgtcaaaaatggcgcatgatactcatgcgttttcatgcaccatagacatgcactcacgcgctctcaggccagccagggaaaaggcgtaaaaaatcccggtactggaccgggattacgtgggcgttttttgctaatcagacagggatttgctgacggcctgacagctttgacgcggagccatagcgattgagcgttttcttctgcttttcaggttgctccggttcgactgatacattttcattgcgtcggggcctcataattatcgtatccacactctccagcgccgtaaatgtgcaggaacattccagattctggcactgataccatgagcgtttaaccgatggtgcttcataggcggaggttctggcgtgtgccgtcgtaccgcattcaggacatttaagtgccattaatatcactcctgcatatcgttaatgttattcaggcgttgctgaaagcgcagatattgtgccggagtgtaagtaccctggcagtcacgaaccatcatggggtcaggcatcacaccggattcatccagaatctcacgataatccccggcgatttcaggcggtgttattgccagctggcgaaccagggcactgcgtaacatacgggacgcaacgtcaacccctccgcgccccttaagaaacggagccagcgcagatgtcagggctgctccattcgcctgcataaaactgctgagagcgtcttctgtgcaggcctccatcagcaaatgctgcgagtaaatgcattcgcgcgcagcacagttaatctgccatttcagcacatccagacgttcccgctgtaattcgagctgccgggcataatctgctggtttttccgtggcagtgaggagagattctatctgttgttcagcggcttttcggctctcactatgtccggcccacagaatacgggcgtttcgaaaagcagtaagcgcctgcgcaggagtggcccgggccgtcatactgatttctccttctcagcccgttcctgacgagccttcattttatgaatagctgccggagagggttgattactgaaatccagacgggccgcataatccggtgcaacgcccgccagtttaaacacagggtcctgttccggcatcgcagcgttagtaagagccggtctggtgatatgtttgtgaataaagtctttcagtactgtgtccgggtcattaactgaatttaccacacccacaacggcactggcttcccgccccattgtgtttttgagcaagctcagtgtctggattaacactttaccatgcgactgcatgaagtcttcccagatttgctttgcgcgaatttccacaagggtgttgtgcgcgctgatgtactgtccggctaatttcccggcttcctgcggtaataaggcattttcgctttcctgagctgccagcagttcatcaaaatcctcaagcgtttcacgccccagcgcaatttccgtacgcagttttttcatttcctttgagactacaccctgactttcacgaaacagcgtgcgccactcctcattcagggcgtttgtcgtggcttccatttcagcgcggcgctggcggattgtcgcaatattatccgttgccgctttctgctgacgacgcgcttcaagccatgcagatttggtggcattcactttctcaagcgcctttagcgtcgctgcagggatagatatgtcaggagtttggttattattttgttctgggatagtcatgtcagcaccttgttgtttgtcttggtgtcaattgtgctgtcatggatacaaagctgccattgaacgtcattgtgcgagcgacaagacaaagacttcttttggctagccagaaaaggcctcatttaactgaatctgtttcagtcttactttaactattcactactattcacttgagtaaaaaaaatagaaaatacagtaagttaaaatgtgaagggttgacagggtagtattcatcgactgttcataactgttcacataagaatgaagttatttatggtattttttcataatggatggttttttattcctcatggctatttgttttttgctcctcaccactattcatccttattcagtagtattcgacaggcgctgaaatagactgcctgttattgccgggaaataacagtttcgcctctggatatggtgttgcatttcatacttatttttataaaactagagctacccggttctttatggatttatttggatatatttttagctttaaatttagattatttaataccaggactttcatgcagggccaatgtttgtgagctaaatgcaattcctacgtatgtccggggggtggggtctgccattaaggcctctacaaaagttgtgaagccttgctgtgtggactctggaggcagcaccattacgtgtaatgactcatggggtaataaatatcctgatgaatgttagttcctattaatactcctgtatttatagttctctggcatggtgtttattatgtcgttttatatggttttaccggattttaagttccatgaaatcaatatttgacgctaaataaataatgcgtgcgcaagcgagttatatatacataataaggaactacctgaatccggatgaatttatccggactgttgtggatattaaagagggtagatgatgcacaatatttctgtttctgcgccagctccggctgcgccattatttcctgtaccgaaccagcatgaacgatttttacgcctgcctgaggtgatgcacttgtgcgggttgtctcgctcgaccatttacgacctgatcagccgcgatgcgtttccgaagcagatcccgcttggcggtaaaaatgtcgcctgggcacagtctgaggtcagcgcatggatggcggaccgtatcagcgcccgtgggcggggatgtgatgcatgatgatacctgaatacattaaatcccttttttctggcttgcttactgccgtcatttccaggtatagtttttccgctgtcgcaaaatcggcagccggaattggcgttccgtgtaacttattggcgacaactgacgcgccttgcgtctttttttacgtcgtagctcaggcacacccattttccgggctgtggtgtttgtgtgtacaccgtggttcattcaagataatggcagtccgggcggggcagccttcgggctggccggtttccaataaggccggttacgccaaccccgttcgggctgccaccagtgaaattggcgtttccggtggtagcaataaccgctacttattggaggctgccatcatggctacaatcctcaccccgtcatacccgcaatatgtctttgtgtttgccgcaatccgccgtactgacactcaaccccgcatttgtatgcttcgcactgtagcctgcgatgagcgttccgcgcgtctttcgctggtccgtgattatgtgctctccctctctgcacgcctgcccgccggggaggtgatgctatgaaccagtttgagatctcctacgacgatgttgtaaggctgaaacatttacgcaatgtgggtgagtatgtaactggcatggcagccctgcaggactgttatgaaaagccagcaggtgcccaatgcgaacaactggtttccctcatctatctgatgacagagcaactggatggagtggtgcaacgctgccatgacgacctgatgaatgcggaggtggcctgatgaaatgctgtgaatctcatctggcacttcgtgccgctctgtatcgccgtgccgttgcctgtgcctggctggctctcagcaatcatcaggaacgttattccggcctgacgctcactgaacttgaagatgccatagcccgcgagctggaagggttctatctgcgccagcatgggcagcaaagagggctggaaattgcctgcgcgttgctttcggatctgattgagtcggggccgcttaaagcctgtccggttctctcattgctcggaatgacggtcatggatgaactttgttcccgtcacctcaacaaaccagcgctgcactaaggagggccgcacaatgtcaggaatgaaagttagccaggctgagaaagcagctcgtggtcactggtcaagaattttacccgcgctgggcgtaaaagtactgaaaaatcggcaccagccctgcccggtctgtgccgggaaagaccgctttcgatttgatgaccaagaagggcggggaacgtggttctgtaaccagtgcggggcaggtgatggcctggcgctagtaagtaaagtactggatgtaggcattagtgaagcggcagacagaataaacggcattaccggaaacctgccgccagtatctcaggaaatgcttgaatctggttctcctgaaaaagaggacgggaaaaaagctgcagcagtgctggctgcccgtttgtttgataagtcccgtcagaccactggcaatgcctatctgacgagtaaagggcttactgcactgccttgccgggaattaaccgccatgcataaagtcggtggtgtggcatttcgcgcgggagatcttatcgttccattgtatgcagatggagagctggtaaatctgcagttaatcaacgctgatgggggcaaatgcttccttaaaggcggtcaggttaagaatgccttttacctgattgaagttactgccaaagcagccaaacggctctggatagcggaaggatatgctaccgcactcactatcaaccatctgactggcgatgctgtcatggtggccttttcatccgtcaatttcctttccttggcgagcattgcctgcagtcagtatccaacgcaccagataattattgctgctgaccgcgatctcaacggtgcggggcaaacaaggggcgaagctgctgccagggcctgcaattgcacaatggcgctcccacctgtgtatggtgactggaacgatgcattcacgcagaacggcgaagaagccacccggctggcaatttatgaagtcataaaaccagctgttgccagccctttcgacacaatgagcgaagctgaatttaccgctctgagcgtcagcgaaaaagcgcagagggtagtggatcactataaaaattcactggcagtagacccgaacgggcagctcctttcacgctatgaggcgggggcctggaaagttatctattacgccgattttgcccgtgatgtcgctgcgctgtttcagcgcctcggcgcacctttttcatccgggaaaattgcctctctcgtggaaaccctcaaactgatagttccgcaacagcagaatccggcgcggcagttgatcggtttccgcaacggcgtgctcgacacccgaacgggattgttcagcccgcacgataagaagcactggttacgtacgctgtgcgaggtggattacacacagcctgttgacggtgaggcactggaaacccatgctccggcattctggcgctggctggatcgtgccgcaggtttcaaacctgaaaagcgggacattatcctggcggcattatttatggtgctggctaaccgttatgactggcagctgtttctggaggtcactggtcctggcggaagcggaaagagtattctggctgaaatagcaacaatgctggcaggtgaggataatgctacttccgcaaccattgaaatgcttgagtcaccacgagaacgagccgcattaattggtttctcactgattcgacttcccgaccaggaaaagtggagcggtgacggggccggactaaaagccatcactggcggcgatgcggtatccgttgatcccaaataccagaacgcctattcaacccacattcctgcagttattctggctgtgaacaataacccgatgcgtttcactgatcgtagtggtggagtttcacgccgaagggtgatcctgcatttccctgaccagatagccccggaggaacgtgatactcagctcaaagagaagattgctagcgagctggcagtgattgttcgccagcttatgcagcgtttcagtgacccaatgagtgccaggacattacttcagtcgcagcagaactccgatgaagcgctcaccatcaagcgtgatgctgattctgcgtttgatttttgcggataccttgaagtcctgcctgacaccacgggaatgtttatggggaacgctaacattgtcccacgtcagcctcgtacatacctttaccatgcctatctggtctacatggaagccaatggctataaaaatacgctcagtctgaccatgtttggcaaggggctgccgttaatgctgaaagagtatgggctgcagtacgagaagcggcggaccaatcagggaatgcagaccaatctggcactcagagaggaaagcaatgctgactggctacctaagtgcgatggcccagcaaccaattaacgtataactgacccggcatacgccgggttttttcttttcaatagatgtagagtttactgttcactctacaccatattgttaacttctattttattgatattaaagttaattatgtggtagtgaacagtgtgcacgcttttctaaagaaaaagtaattttgggtgttgaggacttttggtttggatccgttgtacggaacctaaccggggatataaaaattgtgctttgattacaaatggctaaaaactcgtcttttttaccgatggtaagaaaaaaagtgggggcacaaatgggggcataaatctgtttttattttaaaaaatctttacttaacattgtcttatgtcggcatttgagtccggccttcgcaccatcggaacatcaatagacgtcgacggacgtcttttttgtgcctgaaatccgcgctacgcaaggcttttcgcgattctcctttcaacagaagtcaatctgagtcaacctgtaagcatcccggtaaaccggaccattcacatttagagatcttccggcatactgaatatatccttggaggagatcgccatacgcaaagcccgattcaccgaacaccagatcatcgccgttctgaagtccgtcgaagccggacgcaccgtcaaagatgtgtgccgcgaagccgggatttctgaggcctcgtactacaactggaaagcgaagttcggcggtatggaagcctctgatatcaaaaagatgaaggacctcgaagatgaaaaccgccggttgaaacagatgtttgcggacctgagcctcgagtgccgcgcattgaaagacgttattgaaaaaaagctttaaaaccagcgataaagcgtgagttggtcagctatctgaccgcgcagtttgccatgagcttacgtcaggcatgcaggatattgtcgctgagcaggacggtatttcgttatcagccggatacgcaacgtgatgagccagtcattatggcgctgaccgtggcggctgaacgctatccgcgatacggatataaaaggttttttcaggtccttcgcaggcagggcaacgcctggaaccataagcgcgttcaccggatttacttcctgctgaaactgaattttcgccgtaagggaaaacagcacctgccggtgcgcaatccggctccgctggcaacgccagaggcgatgaaccagagctggtccatcgattttatgcacgatgcgctggtgtgcggcagacgtttcagaaccttcaacgtggtggatggttataaccgggaagcgctggcgatcgaaattgacctgaatatcccggcgcagcgggttgtcagagtgctgggcaggatcgtggcaaaccgcggatatccgctgaagatgcggatggataacggtccggagctggtcttgctgacgctggcacaatgggcagaagagcatggtgtgatgctggaatttctcaggcccggcaagccaacacagaatgcctttatcgaatgattcaaccggacgtaccggacagaaatactggatttttatctgttcagaaccctgaacgaagcacgtgaaattacagagcgctggctggctgaatataacagcgagcgcccccatgaatccctgaaaagcctgacgccggaagaataccggctgatggctgaaaccccggaaatctcaaaaagtgcgtggaactaaaacgggtgcgcttacaccaacgcagaacggattttttgagagttttaacggacgctttcgcgatgaatgtctgaatgagcactagttcagagatatcggtcacgccaggaaaaccattaatgtctggcggcaggattataacgagtgtcgtccacattcagcactaaattatcagacgccatcagaatttgcagcacgatggtgaaatggggaattaaacagttagaaaacagatattactaacttacggttatatcgaatcctgggggctggtcaattatggtgaaaatcgtgaatgtcagcttatttgtagtcatatgagtcatcccgctggcattcgtttgctagatgaccctataaactgttattgtcagccgatgaatcaaacagagttttttataatttaaatgctctgtcccggggtccagagcggttccaaaggataggtataatattcatcatcagcatgattttcatcccagataagtttccctctttgtgtaatccctttcacatgacgtgtatttctttcttcaaagtagccacatgctaaatgtcgaatctgcgcatatctaactgcatttatgccgaggtgatcccatatcactttgttttttatggcgaaatttattcctccgggatattgtttgctggggtatgctataacataaatgtcagaatttttttcaaagatacaattggcaacatatgaagttatgttgtagttatcgctcattagagagtcagaaaggaatttgtcagttataagtaatcgggttacttcatcaggattgcaggcattgatcaatttgttaattgattgtgattgattacccagaagcattcctcttcctgtaacttgagtatgtgaaagttccccgatcggaagaacttttatgctattatagatacgaaaagtagctatagtataataattaaagctattattataattttttaactcgttaagtgcagtgtttttactgctggctgtgtagagaatctcattttcatctgaatcaattctaccgtaggatcttatttcttttggggggcaaagaattttactgacgtggtcaataggggacgcatcatttcccatataccttgctctataatatgaagagccttctccccaatcaacatagagcaaagggtggtgtttgatcaatttagctaagaattcttttttcatagctatgttgtattgagggaaattattgatcccagtgactagctcatcaactgataacggtggaaattgttcgatgatagtctttaatgtcattttaatatactcaaaaatattttttaaatgtcctaattacaaaggataccgctaatccaactattactgaacttagtaccacaaaatattcaggggtaagaaattgcggcaacaccagccccgtcgctgtctagctggatgaaatcatacgccttgcatgatgataaacaaacccggactcatggcctgcgccgaatcgccgtaagtcgcggcgtaccagcccgtcaatcagccctataacaatggtcagcacaaactgtggtagcgcctgcaataaaatagccagcgcagcagaaaggtaagggtaacttaatcgcagactgtaacgcgcagcggattaccgtcgtgacagcctccgtccagaacaacccgctttgaccactgagagaagcaatcagcgccgcgctccctttctgcaacgtatcgctgacaatcgcgaggtcttctactaaccacatcggtgcgccagcagagcttttccaccactgccatgtcgccagcaatacctgctcactgtgactggcgcaggtgttccgccagaaaaacgcctcgcccagccactccagcgttatcgccagcatccacgcgccgaggcaaaaaccgatcagcacgccgggaagtaatgctatccagccgagccgtccggggcgacgcacggggcctggtggcgcatgttcgggcatcagtgcagcggcagagtaatgtagcggcagaggaaccgtgcctcgtgtgcctcatccagtcgtatctgaaaaatgtcgtgttcgccttgcggcgatgtagcttcgcgccatgcctgaaagccctgcaaattcatccgggcgataatctggtcgggcgtttctccctgcgtcagcgcttccaccgcctgttgcaggggaagaggcagtgtttgtgcaggccacatcacttcaacgctcacgagctggcggtgtgtccggggtatcatcggtctgtttctccgtggtttcgctgtcgttcagccataaaatagggtcatttttcgccgttacaactgtctccgggcggtcccaccatatgggcgtgctgtcgtactgtttttccatatagcgggctatgtgtgtgatgctttccggcatcagcggatcgtgtgctgcgtccggtaatgggatgcgtagcttccagagctgaccaccttccagcagagcgaacgcctgccctttgggaagctgtaccagtgaggcgggttccagtaacggcacctgtatgctgctcatccgatcctgggtgttgctggaaaaactgatattgccctgtgcgtcggcgctgtcggcaacgccggaactgatgctgttgctgagcacatccacctgcggcagttgcttcgtcaacaattcgacggtggcagattcccgcacccgcatcatgatccgactgttgaagttgccgacgacctggtccgctttggcgcggtcgccgatgcgggcttctatatcggagagcgtctgggtgtaggccgtaacctctacacctgcgccgccgcctttatttattagcggaataaattcatcgcccatcagttcactgaactcatcgcagtgcaggttgatggccgggttctcttccgtctgcggcaggccatccatcacgccgtgcttgtagatatgtccggcgacgctgaccagatcggcgaacattgaattgccgacagcggcggcaatttctgcgtcagacaatgcatccagcccgacataaataatcgcccgctggcgaatggcctgctgccagttgaatactgggcgcgggtcgttaaggtcgccgtagtccggggccagcagttgggagatttttctggtggtcagtttttccagcagtggcagcagcgaggcgacgatcttatcgaaataggttttgtcatagcgcacggcagtacgtagaccgtcgaggatcgtgtcgtgtaatcgggtggttgaaaggtactgctccagcgcgacgacgtagctgtcccttccctgaagattacgtggcgtgtttttctcagtgatgccaacggcaatccgtaccacgttgccccatgcctggcggtcctggctgggcaaaaagacgcgggcgtagtcgataaatagttcgtcgatgttgataacgtggcgggcgatacgggcgtagtccgggcgctggcccagtgccaccagggcgcgggtgatgatgttgacgaagcgccagtcgaacctcctttactcaaactttagggcagaatcgtctaccggagtggtgggggcagtccagggtggccaaattcagtgtgccactacatattgtctaaaatgagggaggaaggaaaaggctggatctcgccagcctttgacagtcatttcactttcttgaagatgagcaggatcaaagggacgcagacagcgaaaccaatgatggaggctaaagccgaatcagagtgattttgcgctagctccttaacaaaccaggtacattgagaaggggtaaattctccgccttgactcattgtctctgtaaagttaagagcgaagaccagatcgaaataaagcacgatagcgtaatacgctgcacagatcagcgcgatactcacccatctgatccagaacttcttattcatcatcgtaagtgcttcccaatgaaccgcctactgtaccgcctgagtagggggatgttgagccagcaacagcagcggaatcggcagcagattgttgaatttttgcactccctcctattgattgagggcttttgttctcggtgttagggtactgctgtttgaatgtattagtcatttcgacaacgaggattgatgagaaatccgcactctttgattcaagatatctttgcagtgaaaccggaatagtaaaatcttcttctatgtcgattggtagctgtgttgtcgtggatgtgtaaccgtgttcgaatacctttgagccagcaaacttgagcccctcgactgagtgagtggtacagttgctaccagtgacatcatacttatcaatggttcggcctcttcgctttgtaccatcttgcatgtttggcgtttggattggtgttacaccgccattccaaaggttttcgaagaatttacggattattttaggatctgcatcatcaatgcggaaagcgcgagctcccatttcataaagttcgtatcggtaatacttacgcgcatcttcatcttggaaaaagtctaaaatcccatccccagtgaaggtacttttatcagtgcgtccatagcgtccataggtgtagaggaagatattgttattctcatgcactgaaacgaaaacatgacctgcacttgtcgtttcagtccagatataaacgccgttcagcagcgggttatcttctggcttgcaggtgtcagtcacattatcagcttggggatcataaatcgggccggggagaacgggaaattcgacgacttgagattgggctgtgtcggctttcgctgcccctgtagaaaattcataagtgtcatcgatggaaggaataaaacgtgatttgcagggacaggaacaacggctgtgcagtgttccggctactcttttaccatgtatttcgtcactatcaaggccgccgcagatacgataatgccctggatgtttgccgcaggttactttatggccttcacatgccatatctttatcgaaaaattgatggtcggggcatccttcaagaatcctgccaccgcaagcggtcttatcacccctaaataaaaaatgaccaatagccattcgtccttatccttatttttgcttttaattccatgtgggaagtgtaagtttttggtgttggcgagtaaatgagcaaatgtaataaaatcaaagtatgttaatcaatgggagcaggtcgccagctatggatagtgtttatccgcacggtcagttgcagacgagatttccacaattgcctgcattccaacagagcaagagcctgtcttttgtgaagctggatcagggcggcggtatcgcggaccggtaaattactagtggttacctgttagccggtgttgctggtaaagctggtgacgctggaacttatctagcgagtatgttctttcacctttggtggttgcttagaatatggcaccgcttggcctacactctggagaacactggacggaacagaaggtcgtaagttgttccagcaatggctgttgcgggctaagtgccgactaacagatagctgtcataatggtcggcttccggcgtgagaacggaagctacaaccaattctttgaaaataaataaaagcagggctaacgccaatcgtttcattacatccttccgcgaactgcggtgggggtgttgtaagtatcccggcaaaatgaaccattcacttttagagatcttccgacatactgattatgtccccagaggagatcgctatgcgcaagatccgattcactgaacaccagatcatcgccgtattgaagtccgtcgaagctgaacgtaccgtcaaggatgtttgccgtgaggccgctatttcggaagccagctattacaactggaaggcaaagcatggcgggatggaagcggtcgatattaaaaaaatcaaagatctggaagacgagaatcggaggcttaaacagatgtttgctgatctcagtcttgagtgccgggcactgaaagacgtcatcgaaaaaagctttaaaaccagcgataaagcgtgaactcgtcagctatctgacgacgcaatttgccataagtttacgccaggcctgcaggacgttatcgctgagcaggacggtgtatttttatcagcccgatacccggcgtgatgaacccgtgatccacgtgctgactgaactggcagaacgctatccgcgctacggttttaagaagctgttccagctgctgcgcaggcagggcaatacctggaaccataaatgtgttcaccggatttattgcctgctgaaactgaattttcgtcgcaagggaaaacagcggctgccagtgcgtaattcagcacccctggcgacaccgcaagcgttaaaccagagctggcccatcgattttatgcacgacgcgttggtctgcggcagacgcttccggaccttcaatgtggtggatgattttaaccgtgaagcactggcgatagaaatcaaccggaatatcccggctcagcgaatcatccgggtgctggacaggatcgtggcaaaccgcggctatccgctgaaaatgcggatggacaacgggccagaactggtctcgcgggcactggcacaatgggccgaagaacatggcgtgcagctcgaatttattaaaccgggtaaacctacacaaaatgcttttatcgaacggttcaaccggacataccggacaggaattctggatttttacctgttcagaacactgaatgaagcacgggaaattaccgagcgctggctgatagaatataacaacgagcggcctcatgagtccctgaacaacctgacgccggaagagtaccggctgatggctgaaaaaccggaactctcaaaaagtgcgtggaactaaaacaggtgtgcttaaagtggtatcgacattactgtcgtaacggataaaagctttaatacccaagacgtcagttatgaaaagcgcaaagcaaaacagcagcgccttaatgatgcagtggaaaaactaaatgcgctgggcattgtgactatgttggtcaaccgtgttcacagtaaaatcgtgattggtgatgaagggctgctgtgcataggatcgttcaactggtttagcgctacgcgtgatgagaagtacaaacgatacgatacgtcgatggtataccgtggcgaaagcttacaagcggaaattaaaacgatttattccagcctggaacagcggaagttatagggggcttaaagctatgcaggtatcgaatgtgttgaattaatttagcgctactcaaggaggtatagcttcaagatactatgcctccaaaccatgcggttgcatttggatggcttgtttggcgagggtggtttaaatcatcagttaaacttataaaaggccacttttttgaatggcctttagtctaaggagaatttatgccgttgccctgtggttccaggaatctttgtaaatgatattcccatcgcaatgtttccaggtgatggcctcataccttaactgaatcgtctcgctgtgcgtacctgtaccagaatcaggaaataagttgggggtaattccggttacttttacattctctaatataatattaaaatattcgctttcaacacctgcatcaaggatctgatacatctttatggttgccgactttaatgtttggttctcactcagcgctttgtataaaaggggcgttgttttatcaaaatctttctgtaccgtaataggcgtatgtactctggttcctgttaatctcccggtgtttccatccacaggaatggataggtggtgcgttaccgcttttaattcaatagcgccaatacgccctgtaacgagagaactaccagttataggggagccgtttgtatcggttagccaaagatatgctggatttgacatgattattccttatctctatttataaatgaaggtaaacaaaacattataatgacccataaaaacagaccaataaccttaaccggccacgggtcaagtaaggctatgcaaacaatagcgccaataattaatagtgggcctgatagtaaattaaaaataccgcttaacacacctatctttgttcccagtaatctattcaatgcaatggcgatgatataagcgctgccgattataatcgtcactgcgattattttattctgccagttattaaactcagtcaggcaaataaagcatgtggtaataatataggtgcagagaactatatcgacgagtggcgtgatgatttttttcatatcacccagccttagcattcgtatttaaatgatcttccactcttttcataatcttgtcgaatacggggttgccctcggtgtaccctgcatggatggcatccacaaaaggttgtaccgcatcggcaaataagaaataaagaagaacataatcgcggggtcttaacaacgagtatacctcgggcgcttcattcctgagtttatcagacgtcctgatggaacgctctgccattccaccaaacaagaggatagtacttaaaaaggctattggatttcctttccccttaaatactacataagtaaatgacgttttttctataacggctttagcgatgttcgatgcgataatattcgtagagattctacccacgatagaggtaactacacttctgtatattctatcttgttctgattcggatatatatttattaaataactgaaagattaatttaactgcattaacgatattttcatagttaagaatgtcatgtcttatcgcggtcatcatacggattctttctgtttcacgttcatatcttgtatccgtatcaaagataccgtaaatcagataaccataatctaaaggaacagataacccaccattgataagccctgtaactgtatcaggagagataatgatgttatataacttccgcgctatcccttctatgtctgccatatagctatcctatgtttaaataaatgactgaggatctacatcatttttgcaagaaataagcgatgttaatttgcaagagaataaaaaacttgataagtgttaccataacctaattgttacaaattgtattgcaaaatgattttgaaccattgatttaaataaggcgtaaaacatcatagtatatcactttacggttgattattatgatgaattatcttggtgtgagatgtattaatttaataaataataaagcgcatataagtattcgataagtgattggatacgcaaaaaatttggatgttaaaattattggtttaaatgtatttactctgacttgttcatggcagaaacgggttatgactcatgaacaggcggtttatgtgaacacatcgacagcatcatgttgtgccgtcgatatccttcacgagcaaacattgacggattcaccagagtgatatccgcttccggcgtgagagcgggggctacagccaattctttgaaaataaataaaagcagggctaataccaatcgtttcattacgtcctgccgcgaactacggcgggggaatagcgattggtttgcgttatggcgtgacgaccgcggaattgacgatgagacgtgggtagagggtgtgaaacttggtaacttccgtttgtatccgggtacggtttccgagggttgtattactatcgcccataattctgattttgccatgatccggaatgcgcttatgaatacatcactggttcaggtcccctgcatgcgttcccttatggctcgtggttgggtggaggttgttgccagtggctctaacatctcttgcccgtaaaatcagtaagattatttattttatattgctgtttttggttctgggacgtgcacttccaagaccggaaacctatctcgattatgatatcgcaagagatatttgccacttcttattcgggattgtgaatgccgatacgatgtatgacactttcttttatatatcgctgataatagtgatattcctttcagctgtgctttacattatgacattgaagttaatttcaacgataaggagcaaatgagatgccaatccctccgtatatgtggcttaaagacgatggtggcgcagacacgaaaagatctgttgatgttcaggagcgagaaggcagcatcgaaacccgcttatcaccatccccccttaccccctgaacacctcccgccggtgccatgccacaaacccctcctggggataacattctttcccctgcggcaaggtaatcggcttaccatcaaaatcccagaacagcctgccaacgatgcctccgccgttcaccgctggcgaaacctggatgcgcatatcctcatccagaccaatggatcctttatcaaaagccttatggtgaatcgcgcagagcgccaggccgttagggatttcgcaggggccgccgtgctgcttccatttgatatgggccgcttccagggcgacggaggtattatcatggcgcatattgaagccgcagatcgcgcactcatagttataagcgcgcagcacctgctggcgaaaatgcgggtcacgctctttacggatctgcagcagatcaaaccccatctcttcagccagttcttcctgaatactctccggaaagtgcgcctcgaggatttgatgggcgagggtattgatcagcttcttatttctgttgagtagcgcaaaatgcggctcatcaaagccgccggcgacgtggcagagctcaagctctttgccgggcggctgtcggctgccctgggatgaacactgttcgctgttgtgcagctcccagaagccgtcgcctttcaggcgccagaagggcatatccggccggtactggcggcgctgcggaccaaagcgttccagcaggctatgcagctcatcgcgtatctctgaggcgtagtcgaacatccgcgcatggccgcgctggtactgcgagaggacgtacagcagcaatagtggtttatgcggcgcacgctgttcgcctttgcgccagatagtgatgttttcgatcgcgtgttgcagggtggtgctggagggcatagcgttacattggcagctaaataaatgcgatgatgctcgcaaaatccttgccgatcaacccaccagatgcggcggttctacgtggatcgcgatttaactatcactgctatttatttgttcgaaaagcccatagctttctatttatactcaagcttcgcgccatcagatagctatgtcttatgaaaaaactaccggaccatttatccagggaatgcatcatcgccgccattcgcgcttacgatgcaggcgttgcgcatcagtttaaaagcgcgcgtctgtatgagatcgagtttgaggggcgtcggtatccttcaaaagccatcgtcgggttagcggccacgcttgcgacaggaacggaatttaccccgacggatttcagcggagggattaaatccaaatgcgtgcgtctgttactggatcaaggatttacgatcgcgtcgcagggcgctggcgatgacgaggttgcgcttttccccgatgagggacagacgactatggagttcgtggaaggggcggcgatgcaggtggtggtcaatcgctatgagcgcgaccgtcaggctcgtcaggcggcgcttcgcctgcatggctgccggtgtcaggtatgcggtctggatatggccagccgctatggcgaaatcggccagggttttatccatatccaccatctcattccgctggccgggatcaagcaggactaccgtctgaaccctgaaaccgatctgatcccggtatgtcccaattgccatgcaatgctgcaccggcgagatccgccgtttactcccgaagagctgaaggcccggctgcgccccgcagactgacatcctacagcgctcgctttaattacatcacacacagcacaaaccccacgctaccttaccggtagcgtgggctcacacactcttacttatcccgcgtctcgccagcctcccagctgtaactgccatcggccgctaacctatcgcccagctcctgatactcgaactgataaaactcagcctgggtaccgtacccggcgtagtctaccgccgccaggccgacgaacgccccggtaaagaacccgccgtagctctgcaacacatagtcatcggacagcactgcggcatccagctggaccgggatctcggtgaacgtcacgccatcgaagctgtattcatagctgtaggtctgcttgcggaccttggtccggaaccagacgtattccacgccgtccggcaccttgatggcgttatctttcaggtacgacgtgtattttccgcggttattttcgccgacttcgatgactttgccgttaatttcattccaggtcaggaagacgaagctccagtggcggtcgttatagtaattcgttaacccggccatctgctggtagctgaagggctcgaatttcaccttcaccgcggcgtcaaaatagaaggcctgccagcggcgggcaatcagcgacaggtcatgcgtattggctaacgaaccctggccgattaaggttaatttgccgtcgccggtggtgcccattttggccgtaaacggcactcgcagggtattccagttcgggtcgagcgctggcgaggtaaagtcatcctgctggctattatcgctggcgctttcggtgaagatggcgtctttcggcccttcgacgaaggttttcccgccgtgaccgccttcaatacgcggccagccctcgtcgtcccagtacactttctggatcgaggtttcccggccgagggttgaccagccgcgcgggtcgtagatagattcccccgggcgattccatggccgggcgcagagcgaggcgtaataccattcgccttccggggtggagaccagcgcgccatggccctgtttctggatgtagctgtccggggtatcgacgttggttaagaacacgtcgcccggctcggtttcgaagctgtcggcctcgagggttttcgaccgcgccaccacctcctggtgggtaaacacggtgccgccctgggcggcaaacagatagtagtagccgttcagtttatagaggtgcggcccctcgaccagcgccacggcggtgccgcggtagatggtgcgcgcggtttccggcattaacttcagcgttttggtatccagctccgttaaggtaatgccatcgaaggggtgatgatactcccgatgatcccaggtttgctggacgatatatttccggccatcgtcgtcatggaacagcgaggcgtcaaacccgacgccgttcagcttgatcgggtcgctccacgggccccgaatatccttcgccgtggtcaggtagttggtcatgtctttaaaggcgccttcggtgaccttcacatcggtatacaccagccagaattgcccatcggcccaggagagcgccggcgcccaaatgccgccggaggaggggttgcccttcatatccagcagggtggtggtggagagcggcgaaggcagcaggttccagtttttcagatctttcgactcatgtaaacgcacgcccgggaaccactcaaacgtcgagttggcaatatagtacgtatcctcgacgcgaataatactggggtcggcattaaagccgcgtaatatcgggttttgaataagtgacatttcattacaccttttaaaatggaaagtgacgaatcggtctgatttataatttttttaactacacgcggatctcatccagctgacggttgatgtcggtaacatgtttatcggagatcggataaacctgcatgatcaccatcgaaatagcggccagcgcaatcgggatccacactgcggtcataatgatcccgtcgatggcgctggcgctctgcacggcgccgctttcattaaatccatacaccgccagcagccacagcgggatcgcgcctccgatggtgaagccgatcttgaagaagagtcccataatggcattgataatggcggcattgcgtttgcccgattttaattcgccgtacgcgataacttccggtaccagcgcccacataaagccggtggcggaggttaagccccactgtttaataaaggtggcgatgtaggccagccacagggcgtcgtgcatcccttcacgggaccagacgtaggtcagcagttcgccgacgatgaacatggcgaggaacagatggaagaagccttttttaccaaagatttttttcagtttcggccagaacaccgggaaggcgatgccgggaatagacgcgacgagacccacggcgcccatccattcggaatggccgacgacgaactggttgaagaagccgttaacagtgttcatgaagaacatgaaggtaaaggccagcataaagaacatgccgagaataaccagcgggcggttatgtctgagctcgtggaaaaggtcggtggttttgacgttggcggtctgctcggcggtcgcgaccacgcgttctttggtgcatttgtagcagataaacagggccaccgcgccgatgatcatatagatggcgtacacgccgaaccaggcgtagttcgccgacggatcggtatagttgcccagattcagctcaaggccgaaaaagccggtgtctttcaggctgcgatctttcggcgccgccatctgcacaaacatcgggaacagggtatagaccagcaggttggcgctgttggcaagcatcatgcgggtactggtcagtttatcgatcgattccgggtcgcgggtcagcgacgcattcagcgagccatagggaatattgactaaggaataaaccaggtccagcgccagataaataataaaggcgaaagccaccgaacctttcaccccaggaattggcgcgaacagtaatgccgacaggatcaccagcggcacgccggctcgtaacagccaggggcgatatttccctgctttcgaggttcgtttatccacgtaggttccgaccatcggatcccaaaacacattaatgatacggacaaaaagaaaaataaagcctgccgttgccgtgctgatggtatttaccgtcagcatatgcaaagccagaaaacccccaattgtgccgaaaacaaggttttgcgcaaagtcgcccatgccataaccaattcgttctccgcgggttaatttatgatattcatcatgccgactgtgcattatgtttttactcattctaagcagactccggtttgttttgtgtaggtgaaacactttctgacacagttgacctggaagaatctattacgtttttaaattacgtaattatgtttttttacttctgtgatcctcgaagcaaaggcctgtatcgcctgcgttgaatcgttatccgccgctaattttcgggcagacaggcattgtgacaaaaccggcattttaatttggtatggatacctgaattccccaggaagtgtacgctatacgcgcgcgaagcgagatatttaaaatagttttatttgcgagatggctcacatttgagcattttctcaatcgccgagtgaaataacgtaattgagcaaccgacgatgagaatacacgatgtgtcacagttgttaattttcctgtttctcaatttcggagttcatcatgcaaacctatttcgaccaggttgatcgcgttcgctttgccggacccataaccgataatccgctggcgtttcgccactataatccggatgaaatcgtgctgggaaaacgcatggcagatcatctgcgttttgccgcctgttactggcataatttctgctggaatggcgcggatatgtttggcgccggctcgtttgagcgtccctggcaggccgcgggcgatgcgctggaaatggccaaacgcaaagcggacgtggcgtttgaatttttctacaagctcaacgtgccgtattactgcttccacgatgtcgacgtctcgccagaaggcgcgtcgctgaaagaatatctgcacaatttcgccgtgatgaccgaagtgctggcggagaaacagcagcaaaccggcgtgaaactgctgtggggcaccgccaactgctttacccacccgcgctacggcgccggggcggcgaccaaccccgatccggaggtatttgcctgggcggccacgcaggtagtgaccgccatgaatgccacccaccagctcggcggcgaaaactatgtgctgtggggcggccgcgaaggttacgagtccctgctgaataccgatctgcgccaggagcgcgagcagattggccgcttcctgcagatggtggtggagcacaagcataagattggctttggcggcacgctgcttatcgagccgaaaccgcaggagcccactaagcatcagtacgattacgatgtcgcgacggtgtatggtttcctgaagcagtttggtctggaaaatgagatcaaggtgaacattgaagccaaccacgccactctggcggggcactctttccaccatgaaatcgccagcgccatcgcgctgggcattttcggctccgttgatgccaaccgcggcgatgcgcagctcggctgggataccgatcagttcccgaacagtgtggaagaaaataccctggtgatgtacgagatccttaaagccgggggattcaccaccggcggcctgaactttgacgccaaagttcgtcggcagagcaccgacaaatacgacatgttctatggccatattggcgccatggacgtgatggcgctgtccctcaagctggccgcgcgcatgattgaggatggcaagctcgatcagggtctggcaaaacgctatgccggctggcagggcgagctggggcagaaaattatgagcgggcagatgtcgctggataatattgcccgatacgctgagcagcataatctgaatccgcagcctcagagcgggcgtcaggaattactcgaaaatctcgtcaatacctatatctttggttaatttttgctgacatgcccccgcgggggcatgtattgcgccgtttatccgctgctgggaaatagcgtttattggttcgtgctgtgttttttgtcagtggcgaaagaccacctgtttaatatcagcgaaggaggaagggtaacgataattgtgtaacgcctctgtgaccgtacaaaataaaaaataacttgttctgatgatagtgacatattctgtcagctcagaataggctggttattgtctgaataaaattaacctatattgagaaactcatgacaatgataaaaaaacttccattaaccatggcggttatcgccgcgttttttccgcttacctctgtaatggcccaagaatttactcaggaacagatcgacgccatcgtcgccaaagccgttgataaagcgctggccgaccgccaggcgaaaatcgacgccgcggccaacaaaaaggtcgacgtgattactaacccggaaaccaccgccgcctcgccggatatggccattccgttcggcctca

SEQ ID NO: 5326 - DNA, 8707 bp, Unknown
  gut microbiota DNA sequence
cctttttatgtcaaaaccccgctccggcggggtctttgctattcgaatagcggggacaggatgaatgactgtccacgacgctataccaaaagaaggcggcttctcggtcagctaccgttatttaaccaccttaggattctgtagcgtcgggatcgtggaatcttgcacctgatgaacctggccgacgatcgtagcgacgctgccgttgcttaaagcctctacgtctgcgctgttatgcgagccaaaattaaaggtaagacgtttatccgttttattctgttcatctcgcatggtcacgataaaatagtagctgccggcgataccgctcttccgacgaatgtcgacaatcaccccgcgtaccttgacccatttacccagataatcgctgctggccttcgccgggttgagagtaaacggctgcaggaactgagccactgaatacgtctgcatcgaagcgacggcgtcatctccgggttgaaataatttgtctcccgcggaataaaaggctttagaagccaggccgcagccgcttaacagcgagatgacaaaaaccagcggtaatacgcgaaaacgtaataacatctcaatctccttatctatttttaaatgatatccttgatgcgctggataacgtaatatgcgctaattaaattaaaggaaaagtcaccactgtcaaatattttgcttgctgttgaaattaaaataaaacctggtgatgttagggcgtcaactatataagttaacacggtattcatattttatatgttttagtgaagtatattagtgctgtggatatatataatgtttggctatcattttttacatttattcactgcgccctgtaaaataataatccgctatttctgccacctttacttcaggaaaaaaaatgaaattgataacccgtattgcctttgccacgctgttgaccaccggtttctctatcacggctcaggccgcagacgttaaggcggcgccagcaccggcgcaggatcctattgttcagcacttaaaacttaccaacgatcaggtcgcgaaaattaaaagcctgcatcagcagttggagagtaatgtccagcagatttcccaacaggaaattaaagacggggctctgataaacgtgattgattccggtaaatgggatgaaaaagcggtcaacgatcagctggcggccttcagcaagattgatcagcaggtgcgttattaccgcgtgaagtactattttgaggtgaataaggtactgacgccggagcagcgcacgcaggtgaaaaaagatcttgccgacgcgctgagtgaataatgccatcggcccctcgcggggccgatatcttcttcaggccattaatgaaaatcaacccagccattttgccgtttcaggcgagactttcttcatcccgcaggcggatctccgcttcggcaacaatggcttccagttcgctaagcatctcatcataaccaaagctggcggccccggcgacttgcggttgcaccggggctaacggcgttggtgacgccttttttctgtttttcttcttactcactgacagactccatcacttccgttgttacaccggtaaatctatcagcaaagcgcgcagcggcgtatcggcgacgagggtaatgttagcttcgtcacgaataaatgcgccgtcaccgcaggtgagagcctgcttttgctgttcctgtgcgacggcatggacggagccgtgaatcgactgcaggtaggcgcgtggaccatgtaattgcacgttgatctgctcacctttctccagcgcgatatggtagacccaggcctgttggcgaagctggaggctgttatccccgccctccggagaggccagcagctgcagcgtcgcgtctgcgacattgattttctgctgcagcgggttttcccgctgcgggcaggcatcaagccaaagttgcattcgcgttaacgactgctctttactcagattatgctcgctatagctcacgccaggctgggtggcgatcagcagcgcttcaccggctttggcctgcacgtggttgccgtcgctgtcgcgatactccgcttcgccttccagaatcaggttcaggatatcgacttttgggtacgttctggcctggaaggaagcgccgggcgccagcacttcctggttgaggacgcgcaaggatgcgaagcccagtaatttcgggtcgaagtagtggccaaaggagaaggtgtagcgggcctgcagccagccgaagtctgcttgtccgcattgtttggctgttcgggtagtaatcatgttcttgacctctctttacactaaatcaatggtaaaggtatggacgctgtattgttagccagatattctgcccggtatgttcaaatttcctgaatgagaaagcgatggccaaagagagagcattaacgctggaggcgttacgcgtgatggatgcgatcgaccggcgcggaagcttcgctgccgcagctgatgagctgggacgcgtgccttccgccctgagctacaccatgcaaaaactggaggaggaactggacgtggtgctgtttgaccgctcaggtcatcgcacgaagttcactaacgttggaagaatgctgctggagcgcgggcgcgtgctgcttgaagcggcggataaactcaccaccgatgctgaagccctgtcgcgtggttgggaaacccacctgacgatcgttaccgaagcgctggtgcccactccggatctgtttccgctgattgagaaactggcgactaaatcaaacacccagctgtcgattatcactgaggtgctggccggcgcctgggagcggctggagcaggggcgggcggatatcgttgtcgcaccggatatgcattttcgttcctcttcggagattaactcgcgcaaactctattcggtgctcagtgtgtacgtcgcggcgccggatcacccgatccatcaggagccggagccgctctctgaggttacccgcgtgaaataccgcggcgtcgcggtggcggataccgcgcgcgagcggcccgttctcaccgttcaactgctggataaacagccgcgtttaacggtgagtacgatagaagataaacgtcaggcgctactggccggactgggcgtggcgactatgccctatccgctggtggagaaggatattgccgaaggtcgcctgcgggtcgtcagcccggaatacaccaatgaaattgacattatcatggcctggcgacgggacagtatgggcgaagcgaagtcctggtgtctgcgtgagatccccaagctgtttgccggcagatagtgatgaagacgctcctcccgctagcgggaggagcaggaagattagtaggaaaagggtttcggatcgggcccgaagcgattattgccttcggtgccgcgctggcagttaaagatcaggatcaccagccagccgatgaccgggatcaacagcagcaatagccaccaggccgaacgatcggtgtcatgcagacggcgaaattgcaccgcccaccacggtaaaaagaccagtacgccatagatagtggtcagaatgccttcgccgccagcccgctgccagcccagcattttatcgatgatgctcaatacgccggtcaggatgaggttgaccagaataaacatccagtactctttgcgccgcgcacggccgccaaatcctatatagttttttaataccttgagataccagtccatttctacgcctcaattaaccgtcaatcacttgttttttaagcgatcgcaataagaatagacgtgaatgaatggtgggtaaatatctgttttctgaattattgggcgccatcactggcgcccgacagatcaacggaagcgctgatcgcgaccgtgcggttcgttgagatcctgctgcggcccaatggaaataataccggtagggttaatggttttatggctgcggtaatagtggtgacggatatgcggaaaactcaccgtctcggcgatacccggcatctggtagatgtcgcgcaggaaaccatacagattgaggtaatcactgatgcgccgtttatcgcatttaaaatgggtcacatataccgggtcgaagcgtaccagcgttgtccagaggcgaatgtcggcttccgttagctgattgcccgtcagatagcgatgctggccgaggatctgctccagccgctccagcgaggtaaagaccgcatccaccgcttcgtcgtaagcttgctggctggtggcaaagccggctttatacacgccgttgttgacgttgtcatagatccagccgttcagctcatcgatttgttcccgcagcgctggcgggtagtaatccccggcccgggcgccaaggccatcgaaggcggtattgaacatgcggatgatttctgccgactcattgctgacgatggtctgctgttttttatcccacagcaccggcacggtcacgcgtccggtgtagtgcgggtcggcgtgcagatacagctgatagagaaagtcatgctggtagagggtatcgccggtggcttccgggaagctatcgtcaaaggtccagccgttttccagcatcaggggattgaccacggatacggggagaaaaggctccagaccttttaatttacgcataattaacgtgcgatgcgcccacgggcaggcgagagaaacatacaaatgatagcgatccttttccgctgcaaaaccgccttcaccgctggggccagccgcgccgtcggcggtcagccagttacggaaggcggaaacggaacgtttaaaacgcccaccggtggattttgtgtcataccaggtatcctgccagacgccgtcaactaattgtcccatctttgctcctccttcagactacagatagcaaaagcgaggagtggtctcctcgcttttttcattcattcagtatagtgcgcttaccatttcttattcagtacacggtcaatactgaaggcgcccggtccggtaatggccagcagcaggtaaccgcccgcaatggtcaggtttttcatgaacatcagggagttcacgccttccgcaaagttgctatggaacaggaacgcggtcagcagcgtaaagcccgcagtgaacagcgcggtggtccgggtcaggaaaccgaacagaatcgccagaccgccgccgaactcaaggaggatggtcagcggcagcagcgcgcccgggacgcccatggcttccatatactgctgggttcccgcataaccggtgattttgccccatcctgcagtgataaacagaatcggcatcagaatacgcgctaccaatacaccaacatcttctaattttttcatttgttactccagaaaacccaaagggcggcggttttgttttttagtgcaatcccgcgtagttacgcggtgttgctgtcgatggagaggatagtagcgaggcggagagggaattgttagcaaggaaaactgtagatctatttcaaagtttctgagcaatcagtacgcggaggcgaaagtgtaccgaacgcgatgggccaccaccggtcctggtatggcgtgaggtaaagggcgtcgtagagaagggcgcgctacggaaaaggcgcatgttgctgcgaacagggtgcggtaacggacagggaaatggcagagcgtgggcgtcagggaaagcgcccacgctcagggccgttagcgaactgccgactggcgcaggatcccgcgcaccaggcgccaggtgctccacagtccgagtccgcgtttggtccagcgcattaaaaaatgcggatgtcgtacggaccatacggccatcagaccgctgccaaccatcagccacgaacgtaaactcagcagcgtatgccagccgcggtcgaggggcgcagtcgcctcgtgccagtgacggcggcaggcgctgagctccagccgttgctgctggatctggcgcagcagctgcgccttgtgccgttcacgctcctgtcggccattcacgatttatcctcctccagaagggcacggtcgttctccagctctttacgcgttagacgcagcagcgtggatcggcgcgccttacgtagggttaggatacccacgatcgcggcggcaaggagcagcacaacggtggtggcgatcatcacgtgcaggcggtactgagcgtcaacggcccagataaccagcaccagcagactcatgaggccaaacgcggcaaacagcagcgtcagtccggtcatgatcagcagctggaagaggttggctttctcctcctccagctccacgacgaccagacgcagccgcgtttccaccatttcgaccagcagcgtgacgatgcgctgaccaatggagaaaacgcgctgacccggtccctgcgtgtgttgagtattcgccataatcagcgacgcgacagcaggacacccagcaccagcccgacggcggcgccaattcctaccccagtccacggattttcgcgaacataatcatccgctcgcgcggcggtctcacgagtttgacgaagaatcgcttcgctggtttcacccaaacgagcgcggctctctttcagcgcgctctcggctttactgcgcagtttacccatctcttctttcgacttgtccgccgaggaatttagtacttcctccagggtatccgccagcgttttcagttctgcacgaaggtcgtcagtcacattctctttagccatgtcgttctcctgtagcgtggtccgtgttgcgaaagttaatggtgattagtaatcccgagactccagcgtttttaactcctgttgcgcttcattgagtttatgctggcgtttgttaattttgtccgcatcgcctttcttccgggcttcctgcagatcgcgctgacgttcagcgatctcttcccgctgtttggcaattttttgctgatgatcggctttgagtttactgtcgctacagttttcccgaacctgacgtagcgcggtatttagcccatcaatgcgactttgattatgatgcttttcggcgtagctgatctctcgttgaatatcctgctctttttcctggcagggagaggcggctagggcgctggcgctaagtgaagtcaggaccagaagcagagcgatgcggtgtttcatggatagtaccttccattgtctgaggggatacccggaggatatacccgttcccgttggtgaacgtgaatgcgttgattcccgcaggtttaagcatagtaacaaatgcgggaaaccaccagactgggttaaaaacgcagtctggcggcagcttacccgaggcgatgcggcgcgtcgcgcaggcgggatagccaggcggtgggcgagttatcgtcctccagcagggcaataatataaccatgtggcagagcgcggccgagaacttctttcgccgccgcgccctgggcggtggaatcgaacttaatcagcagaccatccttctgcggcgtgatgcttttaaagcggatgccgttggcatcgagatgatgccagacggagaaaccgtccggcattccgataccctggccaaccgggcgtatcgccagcgtggcctcctgctgctgcaccgccagccaaagccagaacagggcgccgagcagaagagaaccacccagcagccagctgaactggcgcagggaagggcgtttcatgaccatcattagccccggcttctgtattttttcttccacagcaccaccagcgagccgatcagtccgaagaccaacagggcaaccggcaggagcatcaggcaggacatcagctgatcttcatacttgaggaataccggggttttacccagcagatagccaagcgaggtcaggatgagcacccacagcaggccgctcatccagttgaaaaactgaaaacgggcgttattaaggccggaaagcccggcgatggtgggcagcagcgtgcgtacgaaggcgataaagcggccgatcagcagcgcggagagcccatgcttatgaaacaagtgatgcgcacgctggtgatagtgcgaaggcaggtgtgacagccagttttgcacgatccgcgtattacccagccaacgcccctgaatatagcttagccagcagccgaggctggcggcggcggtgagcagcagcaaagtttccggaaaacccatcgcccctttggcgatcagcacgcccacgagcacgagcagactatcccccggtaaaaacgcggcaggcaataacccgttctcaaggaacaaaatcataaacaagacaaaatacagcatgcctatcatggagggattcgcgagcgtttcgtaatcctgagcccacaaggcattcaataactgggtaaatagttccattcacgattcctggtacatcggttaacggcacgtctgagcgcgcggcatatagggcgacaagatttttatgagattatggtcgctgcttaggcgctctgaacgcttccctgtataagactgaagtaagtaaatacctacccccagaacgacaaaatgcatctaattgtaacaaatcacctgactttccgtcagagaaattgcaacgtgttgctcgttgattttgctgattgcggagatgggaggcgagaggatttacacaggctgacactatatatgacttgcttactccagcctcactgtcagacaggcgcgcaggggggcgcgccggagggataaggccttatttcgcgccgttgactgcggtatcgagatgaacgactgggttttcggcaaataagtagcgatcggcattaaattcaaagtcatcgctggtttcgttgaacaacatttgcttggtattttctagatgctgccacatcgccagct

SEQ ID NO: 5327 - DNA, 162487 bp, Unknown
  gut microbiota DNA sequence
aggatgtgctcacgagtctgcggcatcgggccgtcagtcgcagcaacaaccaggatcgcgccgtccatctgcgcagcaccggtgatcatgtttttaacatagtcggcgtggcccgggcagtctacgtgcgcgtagtggcgagtcggggtgtcatattcaacgtgagaggtgttgatggtgataccacgagctttttcttccggcgcgttatcgatctggtcgaatgcgcgagcggaaccaccgtaggttttagccagaacggtagtgatggcagcagtcagggtagttttaccatggtcaacgtggccgatagtaccaacgttgacgtgcggttttgtacgttcaaatttttctttagacacggctatattccttactatagtgctctccccttcggagagagcacgggacttaggttttaatcctgtggattatttaccacgggcttcaataacggcctgagcaacgttgttcggcgcatcatcatacttcaggaattccatggtgtatgatgcacgacctttggtcagagaacgcagctgagttgcataaccgaacatttcggacagcggtacttcagcgtggatcttaacgccggttacttcggattcctgaccgcgcagcataccgcgacgacggctcaagtcaccgataacgtcaccagtgttctcttccggagtttctacttcaaccttcatgatcggctcaagcagaactggttttgctttcttaaagccttctttaaaggcaatagacgcagccagtttaaacgccagctcagaggagtcaacgtcgtggtaagaaccgaagtgcagacggatacccatatcaactaccgggtaacctgccagcggaccagctttcagctgttcctggatgcctttatcaacggccgggatgtattcgccaggaattacaccacctttgatgtcgttgatgaactcgtaacctttcgggttagagcccggctccagcgggtacatgtcgatcacaacgtgaccgtactgaccacgaccaccagactgcttggcgtgtttaccttcgatatcggtaactttcgcgcgaatcgcttcacggtaagcaacctgaggtttaccgacgttcgcttcaacgttgaattcacgcttcatacggtcaacgatgatgtcgaggtgcagctcacccataccggcgataatggtctggttagactcttcgtcagtccatacgcggaaagacgggtcttctttagccagacgacccagagccagacccattttttcctggtcagctttggttttcggctcaacggcgatggagattaccggctcagggaattccatacgctccagaatgatcggcgcatccgggtcacacagggtgtcaccagtggttacgtctttcagaccgatagcagcagcgatgtcgcccgcgcgaacttctttgatctcttcacgtttgttagcgtgcatctgaacgatacgaccgaaacgctcacgtgcagctttcacggagttcagtacggtatcaccagagttaaccacaccggagtacacgcggaagaaggtcaggttacccacgaacgggtcggtagcgattttgaacgccagtgcagagaacggctcgtcgtcgcttgcgtgacgctcagccggggtatctttaccgtcgtccaggataccgttgatcgcaggtacgtcaaccggggatggcaggtaatcaattaccgcatccagcatcgcctgaacgcctttgttcttgaacgcagaaccacaggttaccaggatgatttcgttgttcagaacgcgctgacgcagagcttttttgatctcttcttcagtcagttcttcaccacccaggtatttttccatcagctcttcagaggcttcagctgcggattcgatcaggttctggtgccattcatcagccaggtcctgcatgtcagccgggatatcttcgtattcgaaggttacgccctggtctgcatcgttccagttgatggctttcattttcaccaggtcaacaacgccggtgaaaccttcttcagcaccaattgccagctgcagcggaaccgggttcgcgcccagacgggttttgatctgaccaacaactttcaggaagttagcgcccatgcggtccattttgttaacgaacgcgatgcgcggaactttatatttgtttgcctgacgccatacggtttcagactgcggctgaacaccaccaactgcgcagtaaaccattaccgcaccatcaagaacacgcatggaacgttctacttcgatagtgaagtcaacgtgccccggggtgtcgatgatgtttacgcggtgcggttcatactgtttggccataccagaccagaatgcagtagtcgcagcggaagtgatggtgataccacgttcctgctcctgctccatccagtccatggtagcggcgccgtcatgaacttcaccgattttgtggtttacaccggtgtagaacagaatacgttcggtagtagtggttttaccggcgtcgatgtgcgcactgataccgatgttacggtagcgtgcgatgggtgttgtacgagccatttgattcctcgtttatttctttaggcgttcagttaagttatccagagcgggcgactcatctgaagcgcccgcctggtgactatgactccgaagggattaccaacggtagtgagcgaacgccttgttggcttcggccatacggtgaacgtcttcacgtttcttaactgcagtacctttgttgtctgcagcatcagtgagttcgttcgccaggcgcagagccatggatttatcaccgcgtttacgagcagcttcaacgatccaacgcattgccagggcattacgacggaccggacgaacttcaactggaacctgataagtagaaccacctacgcggcgggacttaacttcgacagtcgggcgcacgttttcgagcgcaacttcgaaggcttccagttcagatttaccagaacgctgagccagggtctccagcgcgctgtatacgatagtttctgcagtagattttttaccatctaccatcaggatattgacaaatttagccagcagttctgatccgaacttcggatccggcagaattttacgctgaccaatgacgcgacgacgtggcatggaaatactccgttgttaattcaggattgtccaaaactctaagagtttagtatgacattaagataaatcagtttggccttacttaacggagaaccattaagccttaggacgcttcacgccgtacttggagcgagcctgcttacggtctttaacgccggagcagtcaagcgcaccacgaacggtgtggtaacgaacacccggaaggtctttaacacgaccgccacggatcaggatcacggagtgctcctgcaggttgtgaccttcaccaccgatgtaggaggtgacttcgaaaccgttagtcagacgcacacggcaaactttacgcagtgcggagttcggtttcttaggagtggtggtatatacgcgagtacatacgccacgtttctgcgggcaggcttccagcgctggcacgttgctctttgcaactttgcgcgcgcgtggtttgcgtaccagctggttaattgttgccattaaatagctcctggttttagcttttgcttcgtaaacacgtaataaatcgcctcatatattatgaggacgcagaattttagggcggtgccgaaaaggtgtcaagaaatatacaacgatcccgccatcaccaggccaactgaccggcatgtttgactgtgagtctgacgaaatcagtatagctaaccctgccgacactgtccgcaatttgaccagccagcccgcgggcgtcaacgtcgtcttgcagcacgtatagggttatgggggcggattgcaggatctcaaggaagcgaccatcggcgatggccgcggtgacgccgtcagacagtagtaccagatcgtcgccgtgctccatcaaacgaagcatcgctgcgatgtcggcatgccagggggaaacactgagcgtatggagcatgggggcctcagaaacgcaaaatcacatcaaattcatgcagacgggcgcgcagggcatccggcgccaggcattcgacatccaccacccacggggtcgcgggatccaggccgcgctctcgcgctgagtcggcgcacagccagcactggtcgatatcatatagcgacagcaatttaaaggtagcgatgtagtcgcgggcaagcacagcgccaggccgctgttcgggtaacagctgaaacacgccgtcgcccacaaaaaacacgccaatatcgtcggtgagcgcggaggttgctaataaggcatcgaggccttccctgccggcggcgctgccgtgcggcgcagaggaaaatacaaaagccacacgtttcatcagaactgcaccatccgatcgcaagtaagcgccgcttccgctagcgcgccgagcccgctcaaggtaaaacccggctgcaaattgtggccaggcagagcgagctgttgcgcttcgcgttcgtccgttacgccacgacgcagggcggccgctacgcagatatgcagcgcgacgccgtgctcatcgtggagggattgccacccgcgcaccagatcgaactcatcgctggcgggcgccgtcaactggttagcgttaagcacgccttcgcgatagaaaaaaacgcacgccagctcatggccttcctgcagcacggcctgggcaaattgccaggcgctgctcgcctgctgcgtgccataggctgggccggtcaccgtgagggcaaaacgcattacttatccagtccctggaaatcgccgcttttgaactggcgaatatagaggtagacggtgtgcttggagatgttcagacgatcggctacctggttaatagcgtctttaatatcgaagatccctttctcgtagagattcagcacgatttgacggtttttcgcattgttagacacgctgcgatcggcattcacctcttcaatggtgaactccagcgtctgggcgaccagatcgtctaccgaagaagcaaagttcaccggcgagttcacttcaggcgtttctggcggaataaaggtgctcatgatctgggaaaacggcacatccagattcatgttgatacacagcagaccaatcacccggtgatcgcggttgcgaatggcaatcgtcaccgacttcatcagtacgccgcttttagcacgggtaaagtagcatttggaaacgctgctatcggcgcccgtcatatcgtgcagcatgcgcagcgcaagatcggtaatcggtgaaccgatttggcggccggtatgttcaccattggcgatacggatggcagagcatttcagatcctgcaaagaatgcagcacgatttcacagtgcgaaccgatgagcatcgccaacccgtccactaccgcttcataagatttgagaatatcgaaatcggtctggtcaaagggacgttgatccagcaggtcaagctcgctggtttcattggttaaaagcgacctggacatgaaaaaaagcactccttttcaggagcctgtcgttattgtcagggcaggctcatcatcattattaagctatctaaagtaatacagcgcctgaggatctttccagttttaattatatctgcgctcaataaaaaagccgccgcctctgacgagacggcggcctgaacctgattacttcttagcgtcagctttcgcgtccgcggctttcgcatcgcctgcggcttccggctgtgcatctgccttcggcgccggtttgatatccagcagttctacatcaaagaccagcgtagagttggccgggatgcccgggacgccagttttaccgtaggccaggtccggcggaataaccagcttgattttgccgcctttcttgatgttcttcaggccttcagtccagcccgggatcacgccgtcgagacggaaagagagcggctcgccgcgagtataagagttatcaaactctttaccgtcgatcagggtacctttgtagtttaccaccacggtatcgctgtctttcggcgcatcgccagcgccttctttctcgactttatacagcaggccagtttttgaggttttcacgcccttctctttggcaaagttgtcacggaaagctttgcctttggcttcgttctcagtggcgtctttttccattttctgctgagccgcggtcttcacgcgcgtttcaaaggcctgcagagtctgttcgatctcctggtcggacagtttgctcttatcggcaaacgcgtcctgtacgccggcgatcagctgggctttatccagcttaatgcccagcttctcttgttctttcagggagttttccatgtaacgccccagggacgcgcccagcgcataggccgatttctgatcgtcatttttaaatgccgatttactctcagccgccggggctgccttcgttgccgtatctgcagcgaaggtcagcggtgcattcagggcgacggccattgtggccgccagcagcgttactttaaacagtgatttcatccatttctccagggccggggcctctcgccccagggttatcgtaaaaagcaaaaaacgtactatagaacgttgccgttaaaatctacatacggacgttcctgaatatcgcctcttttaggactatttttgtatgaataagtttcctgtacggcgcagcgatgctgcgcgccaggggaaacttaagtagaatccgcccgcaggatcagactaaagaggttacccatgcacgatagcacattagaaacgcgccttgcggagctggaaagccggctggcgtttcaggaaatcaccatcgaagacctcaacaaaaccgtgaccgcccacgagatcgagatggcgaagatgcgggagcatatgcgtctgatgatcgagaagctgaaggcgacccaaccctcccatatcgcctcccaggcggaagagacgccaccgccgcactattgaggcgtaaaaaaagcgggtttccccgcttttttgtcgtcttcgtgccgaagcgcaaagattagtggcagccgcagccaccgtggccgccgcagccgcctttaccatggtcgtgaccatgatcgtggccgtggccgccgcagcaaccgtcatgaccatggtcatgatcgtgatcgtggccatgcgcgccgtgcacgtgaccgtgctccagctcttccgcagtcgcttcgcggatggcgacgacttccacattaaacttcaggttctggccagccagcatgtggttgccatcaaccacaacgtggtcgtcttcaacttcagtgatttctactggtaccggaccctgatcggtttccgccaggaagcgcatgccaacctgcagttcatcaacgcccatgaagacgtctttcggtacacgctgcaccaggttttcgtcatactgaccgtaagcgtcgttagcgccgacggcaacgtcaaatttgtcgcccacttcgtggccatccagcgcgttttccaggccggaaatcagggagccgtgaccgtgcaggtaatccagcggcgcgcttaccggagattcatcaaccaacacaccgtcttctgtacgtacctgataggccaggctgaccaccaggtcttttgctactttcatgatatctcctgagatgggaagaatagtggcgcagattgtagcggaattctgctgccgtgtaccctttagcttaaaaaaagccgacggataacgctagtcgggatgaaaaatgccaatcacctgctcctctttgcgtacatgctcacgggcctctttatctgcctcacgcatctgatgaccgcacttaacgcactcaacaacatcgacattattctcacgccacattgccagcgaatcctgcgcctggcacgccggacatttcgccccggcaataaaacgtttacgcactgccataagatttacctttattcaaactcgtcccagccgtccagctgccggctctctttctgcatttcgcgctggaaaatctcttccagttcgcgccgggcctcccgcacgcgtgatatctgtaccgtatcagtatgcactggcattagctcgcgcagcattcgcatatcgaggcgtcggaagtgcagctgcgcgcgctgggcctggtgaggatgcatcccgagggtgatgagcgctttgcgccccagctccaacgcactggagaaagtttcgcgagaaaactgcgtcacgccggcctgcagcagctcatgcgcctcaacgcgcccgcgagcgcgggccagaatatgcagatgtggaaagtgttgttgacacatttccaccagccgcatggtatcttctggctcattacaggtgatgacgatcgactgcgcctcttccgctcccgccgagcgcagcagctccagctgggtggcatcgccaaaatagactttatagccatagttgcgcatcagatttaccgcgctgatgtcccgctccagtaccgtaatacgcatcttattggccatcagcaggcgaccaatgacctgaccaaagcgaccaaacccgacaataatcacctgcggcttgtcatcctccacccacggcgcctcaccggtatcgtccgccgggttcagccgtcgcgacaatagcttatctatccccttcatcagcagcggcgtcgtcatcatcgacaacgttaccgccaccagcagcagcgccatctggtcgtgctgaaacaaccgctgagaggcgggcagcgaaaagaggacaaacgcgaactcgccgccctggcttaatacgcccgcgaactgcatccgctcggaacttcgcaggccatagagacgggccagcagatagagcaccagcatttttaccgccaccagcaccgcgacgctcaccgccacccacagtagatgggtatacagtacgccaaggttcagcgccatgccgacggaaataaagaacaacccgagcagcagccccttgaacggatcgatagcgatctccagttcgtggcgatactcactttccgccagcagcacgccggcaataaaggtgcccagcgccatcgacagccccagcgcctccataaacagggcagatccgaggaccaacagcagcgtggcggcagtgaacacctccctgacccccgagctggcgataaaacggaacaccggccgcagcagatagcgtccgccaatcagcatcccggcaaaggccaggaccttcatgccgaccgtcaaccagttcacatgctcatccgctgaaccggccagcaggggcaccagcgccagcgccgggatcaccgccagatcctgaaacagcagcaccgaaaagcctagctgtcccgcttcgctgcggctcattcccttctcacgcatcagctgcagcgccatggcggtggaagacatcgccaggccgatcccgccgaccaccgccgcctgccatgaaaacccggtcgtcatcagcaacccaccgaggatcgccgcgctgagcatcacctgcgccgcgccaacgccgaagatggagctccgcagtcgccatagcttggcgggattgagctccaggccgatgataaacatcagaaacactacgccgagctcagagaaatggagaatttcatccacatcgctgataaacccgagcccccacggaccaatggcgatcccggccagcagatagcccagcaccgcgccaatccccagtcttgaagccagagggacggcgatgacggccgcgaacaaaaacaacacccccgccagcagcaaatcagatcccgccatggacacctccggcggcgatgggattggccaaccagtcccggtaggccagggcgcggctgcgcagctcctctggctgctgcctccgggcccagtagacgataatggggctcatccagtgcatacggcacatgccggcggtcagttcaaaaggacgtaaaatatcgttcatcggatagcgattagcatcgcgacggtaggcgctctcaggctcgccggtagtgatcacgctgcgccagtactttcccgccagttcgttccctccggcgccgctggcgaagccgcggcttaacacacgatccagccactccttgagcagcgccggacagctccaggtatataaagggtgctggaaaacaatcacctcatgctggcgcagcaggtcctgttcgtaagcaatatcgataaaaaaatccggatagtgcgcgtagagatcgtgcacggtgacgttcggcaactgtaaggccggctctaataaaacccggttggccacggaatcctgagattctgggtgggcatacagcagcaacactttcgctgtctgagacatcattcccctcccgtaggtcttctggcggcctgcacagccccggcgttttgacacagccagaatgactttgtgtatcgtcttcgttttgggctaccatggcggcccggtgaagcgattcgcttccacactacattatcataatgacaaattaacatagtctgaacatacggcgccttatgattgttttctcctcgttacaaattcgtcgcggcgtacgcgtcctgctggacaacgccaccgctaccatcaatcctggccaaaaggtcggtctggtggggaaaaacggctgcgggaaatcgacgctgctatcgcttttgaaaaacgagataagcgctgacggcggcagtatgacctatcccggcaactggcagctggcctgggtgaatcaggaaaccccggcgctaccgcagccggcaatcgattatgtcattgacggcgatcgagagtatcgccagctggaggccgcgctccagcaggctaacgaacgcaacgacggtcatgctatcgccaccgtccacagtaagctggacgccatcgacgcctggacgatccgttcgcgcgccgccagcctgctgcacggtctgggtttcagcaatgaacagcttgagcggccggtcagcgatttttccggcggctggcgtatgcgccttaacctcgcccaggcgctgatctgccgctccgatctgctgctgctcgatgaaccgactaaccacctcgatctcgatgcggtgatctggctggagaagtggctgaagggctatacgggaacgctgatcctcatctcccacgatcgcgattttctcgatcctatcgtcgacaaaattatccatatcgaacagcagacaatgtttgagtacaccggcaactacagttcgtttgaagtgcagcgcgccacccgcctcgctcagcagcaggcgatgtacgaaagccagcagcagcgcgtcgcgcacctgcaaagctatatcgatcgcttccgtgccaaagccaccaaggccaagcaggcgcaaagccggatcaaaatgctggagcggatggagcttatcgctccggcgcacgtggataacccgttccacttcagcttccgccagccggagagcttgcctaacccgctgctgaagatggagaaagtcagcgccggctacggcgagcgtattattctcgactccatcaagcttaacctggtgccgggctcgcgtatcggcctgctgggccgcaacggcgccgggaagtcgacgctgattaagctcctggcaggcgagctccagcccgtaagcggcgagatcggcctcgcgaaaggcatcaagctcggctacttcgcccagcatcagctggaattcctgcgcgccgatgagtcgccgctgcagcacctggcgcgtctggcgccgcaggagctggagcagaagctgcgtgattatctcggcggctttggtttccagggcgataaggtgagcgaagaaacccgccgcttctccggtggagaaaaggcgcgcctggtactggccctgatcgtctggcagcgccctaacctgctgctgctcgatgaaccgaccaaccaccttgacctcgatatgcgtcaggccttaaccgaagcgctgatcgactttgaaggggcgctggtggtcgtatcgcacgatcggcacctgatccgttccaccactgacgatctgtacctcgtccacgatggtaaagtcgagccgttcgacggcgatctggaagattatcagcagtggctcagcgactcgcaaaaacaggagtcccagagcggcgaggcgccaaaagagagcggcaatagcgcccaggcgcgcaaagaccagaagcgtcgggaagcggagctgcgcagccagacccaaccgctgcgcaaagagatcgcccgtctggaaaaagagatggacaagctcaacgcgcagttggccagtgcggaagaaaaacttggcgacagtgagctttatgacgcctcacgtaaagccgagctgaccgaatgcctgcagcaacaggccagcgcgaagtccgggctggaggagtgcgagatggcctggctggaggcccaggagcagctggagcgcatgcttcaggaaggctaaactcttcctcttcatcctgcctgcgcgtacgctgccgctggcagggtgggtttctgccctcttcatggcctggccatcagcgacatcaatgatttgtttttgctgtaagctggcgtcactggccgcaagaccacatattggctaaccccctgcatgccctgcgcggtatagtcatcatcacgtttattaattgttctggtgctatggttgaaatcatccccacagacatgacgccccccgaaaacgattcgcgtgagttccatccgatgcgcggcgtgggcaatcgtcatctgcaaaccatgctgccgcggctgattcgccgtaaattgcgctttaccccgcactggcagcgccttgagctgccggacggcgattttgtcgatctggcctggagcgaagacccgcaccaggcgcgccataagccgcgcctcgtcgtttttcacggcctggaaggcagtctgcacagcccgtacgcccatggtctgatccacgcggcgatgcagcgcggctggctgggcgtggtgatgcatttccgcggctgcagcggcgaacctaaccgcaatcaccgcatctatcactccggcgaaacggaagatggcacctggtttttgcactggctgaagcgcgagtttggtcccgcgccgaccgcggccgtcggctattcgctgggcggcaatatgctgggctgcctgctggcagaagaaggcgaccgctgcccgctggatgcggcggtgatcgtctccgcgcctttcatgctcgaagcctgcagctatcatatggataagggcttctcgcgggtttatcagcgctatctgctcaatctgttaaaagccaacgcttcacgcaagctgaaagcgtacccgggctcgctgcccgtcgatttacgccagctcaaagggatgcgccgcatccgggaatttgacgatatgatcaccgccaaaatccatggctttgccgatgcgctggattattaccggcaatgcagcgccatgccgcggctcagcgatatcactaagccgacgctcatcattcacgcgaaagacgatccgtttatggatcaccactctattccgccgcaggagcaactgcccgcgaacgtagagtatcaattgaccgagcaaggcggccacgttggttttgtcagcggcactctgcgtaaaccggagatgtggctggaaagacgcattcccgactggttaaaccgctggctggaggttcccgcatgattattccctggcaggatctggatcccgaaacgctggataacctgattgaaagctttgtgttacgtgaaggcaccgattatggtgaacatgaacgttcacttgccgataaagtcgccgatgtaaaacagcagctgaaacgcggagaggcggtccttgtgtggtcggaactgcatgagacagtcaatattatgccgcgcgcgctgtttaacggctaaggcgacgccactacatcgtttaaccagggagttgttatgtctgccaaacatccggtgatcgccgtcacgggctccagcggcgcgggcactaccaccaccagccttgcctttcgcaaaatcttcgcgcagctaaacctgcacgccgcggaggtggaaggcgatagctttcatcgctacacccgcccggaaatggacatggcgatccgtaaggcgcgggatcagggcaaacatatcagctactttggcccggaggcgaacgacttcggcctgctggagcagacctttgtcgactatggtcgccacggcaaaggtcagtcgcggaaatacctccacacctatgacgaagccgtgccgtggaatcaggtgccggggacctttaccccctggcagccgctgccggagccgacagacgtgctgttctatgaggggctgcacggcggggttgtcacgccgcaacatgatgtcgccagccatgtcgacctgctggtcggggtggtgcctatcgttaacctcgagtggatccaaaagcttattcgcgacaccagcgaacgcggccactcccgggaggcggtgatggactcggtcgtccgctcgatggaagattacatcaacttcattacgccgcaattttcccgcacccatatcaactttcagcgcgtgccgacggtggacacctccaacccgtttgccgccaaagcgatcccctcgctggacgagagctttgtggtgatccatttccgcaatctgcagaatatcgatttcccctggctgttggcgatgctgcagggctcgtttatctcgcacatgaacaccctggtggtgccgggcggtaaaatggggctggcgatggagcttatcatgacgccgctggtcgagcgcctgatggaaggccgtaagataggctaaccaaaaaaccccggcctggccggggttgagattcgatacaacggcaggcgaagactacgcctcgatcacttcataggagtgggtgatgttcaccgctttttccagcatcagcgccaccgagcagtatttctctgccgacaggtccaccgcccgggagaccgcggcatctttcagcgccttgccggtgacgataaaatgcagattaatatgcgtgaacagacgcggagcctcttcgcgacgctcggaggtcagcttcacttcgcaattggtcacgtcgtgacgacctttttgcagaatggagaccacatcgatcgcactgcaaccgcccgccgccatcagcaccatctccatcgggctgggagccttatccccggagttgccatccatcagaatctggtgtcccgatgcggactccccgataaaggttaacccttctacccatttcacacgcgcttgcataaaatttaactccagtatcgcaatattcctgtcagattacgcgcacataacaattctcgcaacggaaggcgacctgcgtcatgctgaagcgagacaccaggagacatgcggcgaaagctatgctaaaacagtctggatgctacagtaatacattgatgtactgcatgtatgcagaggagttcacattacgggctgtcgaaaaatcatcagccagcttcccaggtatagggaaacaatacgattgcatgcccggacgccgtgtagtgtcggcgcccggagatagcttataacagaggataaccgcgcatggtgcttggcaaaccgcaaacagaccctacccttgaatggttcttgtctcattgccacattcataagtacccatcaaagagcacgctgatccaccagggtgaaaaagcagaaacgctgtactacatcgttaaaggctccgtggctgtactcatcaaggatgaagaaggtaaagagatgatcctctcctacctcaaccagggcgatttcatcggtgaattaggcctgtttgaagagggtcaggagcgtagcgcctgggtacgggcgaaaaccgcatgtgaagtggccgaaatctcttataagaaattccgtcagctgatccaggtgaacccggacattctgatgcgtctctcttcgcaaatggctcgccgtctgcaggtcacgtctgagaaagtgggcaacctggccttcctcgacgtgacgggccgtatcgcccagacgctgctcaacctggcgaagcagccggatgccatgacccacccggacggtatgcaaattaaaattacccgccaggaaattggtcagatcgtcggctgctctcgtgaaaccgttggtcgtattttgaaaatgctggaagatcagaacctgatttccgcgcacggtaaaaccatcgtcgtctacggcacccgttaagttgctaagcggcgtattgctcccgcagtacgccgtttttgtttttccctcatgtggcgcaggctgatttaccacccggaagtcaactatgcactgcggcaaacgctggtgctgtgtctgcccgtggccatcggtcttctgctcggccatctccagcaggggctgttattttccttagtccccgcctgctgcaacattgccggtcttgataccccgcataagcgctttttcaaacgcctgattatcggcggctgcctgtttgccggatgcagtctggtggtgcagttgctgcttgcccaggcgatacccctgccgtttattctcagcggcctggcgctcttgctcggcgttaccgcggagatcagttcgctgcacgcgcggctgctgcccgcgtcgctgatcgccgccatctttaccctgagcctggcgggcaatatgcccatctgggagccgctgctgatctacgccttcggcacgctgtggtacggcgtgtttaactggttctggttctggctgtggcgcgaacagccgctacgggagtcgcttagcctgctttaccgggagctggcggactactgtgaagccaaatacagcctgctgacccagcataccgatccctcgaccgccctgccgccgctgctcacccgccagcagaaagtggtcgatctgattacccagtgctatcagcagatgcatatgctggccgctaaccaacgcaacgatcataagcgcctgctgcgggcgtttcagatggggctggatctgcaggagcatatttcggtcagcctgcatcagccggaagaggtgcaaaagctggtggaacgcagccatgccgaagcggtgatccgctggaacgcgcagaccgtcgccgcccgcctgcgcgtgctggcggatgacatgctctatcatcgctttccaaagcgctttcagatggataaacagatcgaggctctggaaaagatcgccagacaacatccggataacccggtcggccacttctgcgcctggcacttcagccgcatcgcccgggtgctgcatacccagcgcccgctgtatgcccgggacctgatggccgacaaagagcgtcgtttaccgctatttcccgcgctaaagaactacctgtcgctaaaatcgcccgcgctgcgcaatgccgcccgcatcagcgtgatgctgagcgtcgccagcctgatgggcaacgccctgcatttgcctaagccctactggatcctgatgacggtgcttttcgtcacccagaacggctatggcgccacccgggtgcgtattgttcaccgggcggcggggacgctcgccggcctgacgatcgccgggctgaccttgcattttcacgttccggagagctacacactgagcgggatgctgctgattaccctgctcagctatctgatcattcgcaaacactatggctgggcgatggtaggctttacggtgacggcggtatataccctgcagctgctgacgcttaacggcgaacagtttattatcgcccggctgatcgacacccttatcggctgcctgattgccttcggcgggatggtctggctgtggccgcagtggcagagcggcctgctgaaaaaaaatgcccacgatgcgctggaggccgaccagcaggcaattcgcctgatcctcagcgccgatccaaaagcccccgcgctggcctatcaacgcatgcgcgtcaaccaggcgcacaacgcgctctacaactccctgaatcaggcgatgcaggaacccgggtttaatacccactatctggaagatatgaagctgtgggtgacgcacagccagtttatcgtcgaacacatcaacgctatgaccaccctggcccgggagcatacgatgctgaccccggatcttgcccagcgctatctcgaatcctgtgagattgcgctgcagcgctgccagcagcggctggacagcgatggtcccggcagcgcaggggatgccaatattatggagtcgccggaaagcgaggcgccgatcggtccgttaagcaccctggagcagcatctgcaacgcattctgggccatctgaacaccatgcacaccatttcgtcagtagcatggcgtcagcggccgcaccatggcatctggctgcggaagatcaaccgttaatcacctttgccaccgcctgggcaaagcgcgccatcccttcagtaatatcctgctcgtcgatgatcagcgagggaacaaaacgcatcacgtccggcccggcgttgagcaccatgacgccggcgtcggccgcggcatagaggaaatcacgcgcgcggcctttgtgctgcggcttgagttccgcgccgatcagcaggcccatcccgcgtatatcactgaacagatcaaactcggcatccagccgctgcaggtgtttgacgaacagttcgcgcttcgcgctcacgccatccagcaccgccggggtattgatcagatcgaaggcggcgttggcgaccgcgcaggccagcgggttgccgccgtaggttgagccatgggagcccgcatggaaggcgctggcgatctcgtgggtggtcagcatggcgctgaccgggaagccgccgcccagcgctttggcgctggtcagaatatccggggtcacgccgtagtgcatataggcgaacagcgatccggtacgccccataccacactgtacttcatcaaagacgagcagcgcctggtgctgatcgcacagctcgcgcagtccctgcaggaaagccggcgtggccgccgtcacgccgccttcgccctgaatcggctccaccaccaccgcgcaggtgtggtcatccatcaccgcttttaccgcctgcagatcgttgaagggaacatggacaatatccgccggttttgggccgaaaccatcggaatacttcggctgaccgccgacggaaacggtaaacagggagcggccatgaaaggcattatggaaggcgatgattttggttttatacgggctatggcgggtcaccgcatagtgacgcgccagcttaaaggccgtttcattggcttcggtgccggagttcataaacaccacgcgctcggcgaaggtagcctcgacaagtttacgtcccagacgcagcgccggctcattggtaaagacgttgctggtgtgccacagcatttcgccctgctgatgcagcgccgccaccagcgccggatggcaatggccaagcgccgtcaccgcgataccgccggcgaaatcgatatactctttcccctgctgatcccagacgcggctgcctttccccttcaccgggatgaattctgccggtgcataaattggcaaaataacttcatcgaatgtggcgcgggtgattgccggttgttcagttgccatgtcttgcccatccctcttcgttacgcagatgcgattatgataatctaatcacaaaatatgcataaaaaatcagtcaatagcaactgaaaatcaccgtttcaaaaagttggccagcaattgatggccctgctcgctgaggatactttccggatgaaactgcacgccctcgagatcccattcgcggtgacggatccccataatctcaccgctggcgctgcgggcagtgacgttaaactcggacgggagcgtcggcgggtcaatcaccagcgagtgatagcgggtcaccgtcaggggattattcagcccctgaaacaccccttcgccgttatgctcgataagcgaggttttgccatgcatgacctgggccgcccgcacgatagtcgcgccaaacgcctgggcgatcgcctgatgcccgagacagacgcccagcagcggcgtttttccggcatagtggcggataaccgcgagggaaatccccgcctcatccggcgtgcaggggcctggcgagatcacgattttctccggcgccagcgccgctatctcctccagcgtcaacgcatcgttgcgtctgaccagtacttccgcccccagttcgcagaagtactgatacagattccaggtgaaagagtcatagttatcgataagcaggatcatagcggctccggaacaatcaaaaccgggctattctactcagattcccgcgcttcgcttaccactttgcgaaagatcgccaccagcggggccagatcgcccatcgcgctctgctggcaggccgcactccagccggcggggtcaacgtcacgccagttaagaaggtagccggcatgtatcgccagctgttcaaagaaaatgcgctgggtcaggccattgccaagacgaaaagggtgcagcacattaatttcaccatagaaccagctcaggcgttcgataaaggtatcgcgcggcaggccactgagataatcctcctgctcaagggcctgcatcagggcattcccctcctcctcgatccgggcaaagtggcagaacggcgtatcgcccaggtagaggttcacttcacgcaagcggcccgcccagtcaaacagatcctgatacaactggtgatgaatagcgcacagatagggtaagccgcgcacccgcgggcccagcggcagagtggccgcccgcagcgctgtcatctcaaaggcggcctgctgcagatttttagcctggcggatgccgagacggttgcgcagcacgttcagcgccggatagagataaggatcgcgttcatcgccgaatttatcgctcatactccctccgcaacgtcgccagacgcgccagcgcctcttcggcagtcagcgtaaccagcggcaccgtcacgccttcaaggcgacggctggcctgaaaattggtattgcgtgtctgttcccagagtcgggatttttgcttatcggtgagtggacgcatcgtcgccccccttatcgtcccctgtgtgccacaagtataagcagcaatttcaggttatgccgggaggcgaccgggcgcggcgatagaccaccgcgccgcgggaggattagggcagcactttcgcagagaggataacgaccggtttggtcggcacattctggtacggaccaacgttatgggtctggacctgggagatcttatccgcaacatccatccccttcaccactttgccgaataccgcatagccaaagtcgcgctggccatggtcgaggaaggcgttatccgccacgttgatgaagaactgactggtggcgctatcctgatcggcggtacgcgccatcgcgatggtgccgcgggtgttgcgcaggccgttgtctgcttcattcttgatcggcgggttaggctgcttctgctgcatctgttcgttaaagccgccgccctgcaccatgaatcccgggatcacgcggtgaaaggtggtgttgttgtagaagccgctgttgacgtacttcaggaagttatccacggaaatcggggctttctggctgtttaactcaagctcaatgttacctgccgaagtggtcagcagcacatgcggatcgccctttgccgccatggccggggagaacgctgaaatagcgaaaacggcggccatcgccgccagtgttgatttgagcatggaaattccttaacggagcagaataaaagcgagtgccttgattctaaagagcctttgcatcctgggccagccttttaccaaattttacttagctgtaataattgtaaccgcgcaaacgatctcctttgcagcgaacaagcgtgatgcagatcacattaaaacatgcaaaagataacccatttcacaataaacatttaattacatcacctgaacgaataaaatctgtccgcccggcgcagcgtcaacgcgctttacctttctattcacaggccagtcatgactaacagcaaccgtattaagctcacatggatcagcttcttctcctacgccctgaccggcgcgttggtgatcgtcaccgggatggtgatgggtaacattgcggattatttccatctgcccgtttccagtatgagcaacacctttacctttctgaacgccggtattctgatctctatcttcctcaatgcctggctgatggaaatcgtgccgctgaaaactcagctgcgctttggctttattctgatggtgctggcggtggccggcctgatgctcagccacagcctggcgctgttttccgcgtcgatgttcgttctcggcctggtgagcgggatcaccatgtcgatcgggaccttcctgatcacccatatgtatgaaggccgtcagcgcggagcgcgtctgctgtttaccgactccttctttagcatggcgggaatgattttcccgatggtcgccgccgtcctgctggcgcgcagcatcgagtggtactgggtctacgcctgtattggtctggtgtatgtcgccattttcgtcctgactttcggctgtgattttccggtgttgggcaaaaaagcgcagagcgaaaacagccagccggtagtgaaagagaagtggggcatcggcgtgctgttcctctccgttgcggcgctgtgctacatcctcggtcagctgggctttatctcctgggtaccggaatatgcgaagagcctgggcatgagcctcggggatgccggtaaactggtgagcgatttctggatgtcctacatgatcggcatgtggtcattcagcttcatcctgcgcttcttcgacctgcagcgtatcttaaccgtcctcgccgggctcgcgacggtgctgatgtacctgtttatcaatggttccccggagcatatgccgtggtttattctgaccctgggcttcttctccagcgccatctacacctcgatcattacgctcggctcgcagcagacgcgggtcgcttcgccgaagctggtgaactttatcctcacctgcggcaccatcggcaccatgctcactttcgtggtcaccggcccgattgtggctgccagcggtccactggcagcgctgcacaccgctaacggcctctatgccgtggtattcgtgatgtgctttatcctcggcttcgtctcccgtcaccgccagaacaacgctcaggcggcgtctcactaagccttcggcccctttgcgtccgcaagggggctattcctcataaaagagagctcctcgccaccgcggtcggtctggatccaggtttgcgccagctgggtggtcgcgatcacccttccctggcgaattgaccaacgcacaggcacctggcagcggacggcctcaaagccattctccgccgggagaatgatcaggttagccgggttgccgctgactatgccgtaatcctccaggccaaatgtgcgggcgctgttgtcggtgataagcttcagaccgtcgttgatctgctggtagcccatcagctggcagacgtgcaggcccatatgcaggacctgcagcatattgccggtccccagcgggtaccacgggtcaaagacgtcatcatgaccaaagcacacgttgatccccgccgccatcagctccttcacccgggtaatcccccgtcgcttagggtagtcatcaaaccggccctgcagatgaatattcaccagcggattggcgacaaagttgataccggagagcttaagcaggcggaacaggcgcgaggtataagcgccattataggagtgcatggcggtggtatggctggccgtcacccgcgcccctgtccccgcctttaacgccagcgcggcaacggtttcaacaaagcgcgactgttcatcgtcaatttcatcgcagtgaatatccagcgggcgatcatatttttgcgccagccggaaggcgatatgcagcgactccaccccatattcacgggtgaactcaaaatgcgggatggccccaacaacatccgcccccagcttgagggcctcctccagcagcgcttcgccgttggggtaagagaggatcccctcctgtggaaaagcaactatctgcaactcgacccatggcgcgacctcccgtttgacctccagcatcgccttcagcgccgttaatgtgggatcggagacgtcgacatgagtgcggacaaactgcacgccattggcgatctgccacttcagggttttccacgcccgggctttgacgtcctcatggctgagcagcgcttttcgctccgcccagcgctcaatcccctcgaacagggtgccggactggttccagtgcggctcgccggccgtctgggtggtatccaggtggatatgcggctcaataaaaggcgggatcgccagcccgccgcgagcgttcaacacctcgtagctttcgtcgcgcgcctcgcccatcggcgtgatctcgccaaagcggcccttatcaatcgctatttgccacaggccgtcgcggtctgccaggcgtacgttctgaattaaccaaagcggcgctgctgtcatatcaccttctccattcaatatggctagttttctgcccaaccccaatcgcggcccatccaattcttgtacacaaaatcagcaaaaaggaaaagccagcgttttccataacttagaaaaatacagataaatcaattatatacccattaagtggtaggtgaagttgtcattgatttgcatcaataagcctgatggctgaatcgttaaggtaggcggtaatagaaaagaaatcgaggcaaaaatgagcaaagtcagaatcgctatcatcggtaacggcatggttggccatcgctttatcgaagagcttctcgataaggcgcctgccggacagttcgacattaccgtgttctgtgaagaaccgcgtatcgcctacgaccgtgtccacctgtcgtcttatttctcccaccataccgcagaagagctgtcgctggtgcgcgaaggtttctatgagaaacacggcgtcaaggtgctggtcggcgaacgggcgatcactattaaccgccaggagaaggtgatccactccagcgccgggcgcaccgtgttctacgacaagctgattatggcgaccggctcatacccctggatcccgccgattaaaggcgcggaaactcaggattgcttcgtttatcgcaccattgaagatcttaacgcgattgaatcctgcgcccgtcgcagcaaacgcggcgcggtggtcggcggcggcctgctcggcctggaagcggccggcgcgttgaaaaacctcggtgtggaaacccatgttatcgaattcgcgccgatgctgatggccgaacagctcgaccagatgggcggcgagcagttgcggcgcaaaatcgaaagcatgggcgtgaaagttcacaccagcaaaaacaccaaagagattgttcagcagggcaccgaggcgcgcaaaaccatgcacttcgccgacggtagcgagctgcaggtcgatttcatcgtcttctcaaccgggatccgcccgcgcgataagctggccacccagtgcgggctggcggtcgcccagcgcggcggcatcatggtcaacgatagctgccagacctccgatccggatatctatgctatcggggaatgcgccagctggaacaaccgcgtctacggtctggtcgcccccggctataaaatggcccaggtggccgtcgaccatctcctcggcagtgaaaatagcttcaccggcgccgacctcagcgccaagctgaagctgttgggtgtggacgtgggcgggatcggcgatgcccacggccgcacgccgggcgcccgtagctacgtctatctcgacgaaagcaaagaagtttataagcgcctgatcgtcagcgccgacaacaaaacgctgctcggcgcggtactggtcggcgacaccagcgactacggcaatctgctgcagctggtgctcaacgccatcgagctgccggaaaacccggattcgctgatcctcccggcccacgccggcagcggcaagccatcgatcggcgtggataaactgccggacagcgcgcagatctgctcctgctttgacgtcagcaaaggcgacctgatcgccgctatcaacaaaggctgccacaccgtggcggcgctgaaagcggaaaccaaagccgggaccggctgcgggggctgtattccgctggtcactcaggtgctcaacgccgagctggcgaaacagggcatcgaggtcaacaacaatctgtgcgaacacttcgcttactcccgtcaggagctgttccacctgatccgcgtggaaggcattaaaaccttcgacgaactgctggaaaaacacggtcagggctacggctgtgaagtctgtaagccgaccgtcggttccctgctggcctcctgctggaatgagtacatcctcaagccgcagcacacgccgctgcaggacagcaacgacaacttcctcgccaacattcagaaagatggtacctattcggtgatcccgcgctcagctggcggcgaaatcacgccggaagggctggtcgccgtgggccgtatcgcgcgtgaattcaatctgtacaccaaaatcaccggctctcagcgcatcggcctgtttggcgcgcagaaagacgacctgccggagatctggcggcagctgattgaagcgggattcgaaaccggccacgcctacgccaaagcgttacgtatggcgaaaacctgcgtcggcagcacctggtgccgctacggcgttggcgacagcgtcggcttcggcgtagaactggaaaaccgctataaaggtatccgcaccccgcacaaaatgaagttcggcgtctccggctgcacccgtgaatgcgcggaagcgcagggtaaagacgtcgggatcatcgccaccgagaaaggctggaacctgtacgtttgcggtaacggcgggatgaaaccacgccacgccgatctactggccgcggacctcgatcgcgatacgctcatcaaatatctcgaccgctttatgatgttctacatccgcaccgccgataagctgacccgcactgcgccgtggctggacaatatggaaggcggtatcgactatctgcgcagcgtcatcatcgatgacaagctcggtctgaacgaccatctggaagaagagctggctcgcctgcgcgccgccttcgcctgcgagtggaccgagaccgtcaacaacccggcggcgcagacccgcttcaaacactttatcaacagcgaccagcgcgacccgaacgttcaggtggtgccggaacgtgaccagcaccgcccggccacgccgtatgagcgtatcccggttactctggtggaggaaaaagcatgagccagtgggtaaatatctgcagcatcgacgacatcctgccggccaccggcgtctgcgccctgctcggtcagcagcaggtggcgatcttccgtccctaccatgacgacagagtattcgccatcagcaacattgatccgttcttcaacgccagcgtactgtctcgcgggattatcgccgagcatgacggcgcgctatgggtcgccagcccgctgaaaaaacagcgcttccgtctaagcgacggcctgtgcatggaagatgccagccactcaatcgcccgcttcgacgctcgcgtgaaagacggacacgttcagcttaaagcgtaagtccttctccctccccccggccacggggggagatataagtaacagttctgaccgacagcgcatgagtgcgggatatgtcgcatgttttgtattacctttgctgctattctacgaccactcgttttctaccccttatttttatgaggttattctgtggatcacttacccatattctgccagttgcgccagcgcgattgtttactggttggcggcggggatgtcgccgaacgcaaagcccgtctgctgctggatgctggcgctaacgtcacggtcaatgcgctcgacttcacgccccagtttcaggtgtgggctgattcacagatgctaactctggtgcagggggagtttatcccctcgctgctggataactgctggctggccatcgccgctactgatgatgagacggtcaaccagcaggttagcgaggcggccgaagcgcggcgtatcttctgtaacgtggtggatgccccgcgccaggccagctttatcatgccgtcgataatcgatcgctcgccgctgatggtcgccgtctcctcgggcgggacatcaccggttctggcgcgcctgctgcgcgagaaactggagtcaattctgcccctgcatctcggccagctggcccgctatgccggccatctgcgcgcgcgggttaagcagcagtttgccaccgtaggcgagcgtcgccgcttctgggagaagctgtttgttaacgaccgtctggcgcagtcgctggctaatgacgatcggcaggcagtcgcggataccactgagcagttgctgacggagccgttggagcatcgcggcgaggtggtgctggttggcgccggccccggtgacgccgggctgctcacgctcaaaggcctgcagcagatccagcaggctgacgtggtggtctatgatcggctggtctccgatgacatcatgaatctggtgcgccgcgatgccgatcgggtgttcgtcggcaagcgctcaggctaccactgcgtcccgcaggaggagatcaaccagatcctgctgcgcgaagcgcaaaaaggaagacgcgtggtccggctgaaaggcggcgatccctttatctttggccgcggaggggaagagctggagacgctttgcgaggcgggcatccccttctccgttgtgcctggcattaccgccgcctccggctgctccgcttattcggggatccccttgacccaccgcgatttcgcgcagggcgtccgcctggtcaccggccacctgaaaaccggcggcgagctggactgggcgaacctggcggtggagaagcaaaccctggtgttctacatgggtctgaaccaggcgccagcgatccgcgagaagcttatcgctcacggcatggctgaagatatgcccgccgccatcgtcgagaacggcaccgctgtgacgcaaaaagtggtcagcggcaccttaggacaactggatattctggcgcagcagatggccagcccggcgctgatcatcgtcggccgcgtggtcggtctgcgggataaactgaactggttttcgaaccattaaccttgcctcccataaagcgacaggcataaaaaagggcgggatatcatcccgcccttttagctgttgcgtcgcttacggcttggcgacaaagccaatcgcttcgtataccgctttcagggtttgagaagcccgcgcgctggccttttccgcgccgtctttcatcacctgattgagaaacgcttcgtcgttacggaaacggtgatagcgctcctgcaggtcaatcagcatgcccgataccgcttcggcgacttcgcctttcaggtggccatacattttgccttcaaaatgctgttccagctcaggaatagttttcccggtaaccgcggagaggatatccagcaggttggagacgcccgctttctctttcagatcgtaacgcactaccggcggctcgtcggagtcggtgaccgcacgtttaatcttcttgaccaccgatttcggatcttccagcaggccgatgacgttgttgcggttgtcgtcggacttggacatctttttcgtcggctccagcagcgacatcacgcgcgcgccggatttagggataaacggctcaggcactttaaaaatatcgccgtagatggcgttaaaacgctgggcgatatcgcggcttagctcaaggtgctgtttctgatcttcgcccaccggaacctggttggtctggtacagcagaatgtcagcggccatcagtaccggataatcaaacagaccggcgttgatgttctccgcgtagcgcgctgacttgtctttaaactgagtcatgcggctcagttcgccgaaataggtgtagcagttcagcgcccagcctagctgggcatgttccggcacgtgcgactgcacgaagatagtgcttttctgcgggtcgatgccgcaggccagatacagcgccagggtgtccagcgtcgccttgcgcagctgctgcggatcctggcgcacggtgatggcgtgctggtccacgatgcaatagatgcagtggtaatcgtcctgcatgtttacccactgacgcagcgcacccatatagttgccaatggtcagttcacctgagggctgtgcgccactaaaaacgatgggcttagtcatgtttcaattcctgagtttcactgtgcggtaacccgagagcgggtaagagttcgttaaactggtcgaatagatagtccggctcgctcagcgcaagcggttcaccatagttataaccgtaggtcagaccaacagagcagcagcctgccgctttggccgcctgaatatcattgcgcgaatcgccgacaaacagcagctcggctggagccagagagagcttttccgccaccagcagcagcggttccggatgcggctttttattctgcacgtcatcgccgccaatcaccacggtaaaatatttcgcaatatcgagcgcgtccaacagcggggcgacaaacggcgtcggcttattggtaaccagcgccagcggcaggcctttggcatgcagcgcgccgagcgtatcggccaccgccgggaacaggaaactgccctcttccgccgcttcggcgtaatagcggtcaaacagtttacgcaaaatgcgcagctgctcgtcttgcggaatatcatgatcgtcgacggaaggcttgcccatcgccgcacgtaacgttgctcgctcctgacgagcccaggtcagcgcccgctccatcaggacatcggcgccgttaccgatccaggtgataacgcgttcttctcccgccaccggcagctccagggcgtacagagcgttatcaaccgccgaggttagacccggcgcgctgtccaccagcgtgccgtcgagatcaaatgcgatgccgcggatcgcctgtaatttatccatgactcaccttcgctaattcactacgcatttgatcaatgacttgcttgtagtccggctgaccgaagatcgccgaaccggcaacaaacatatccgcacccgccgcggcgatttcgccgatattgctggctttcacgccgccatccacttccaggcggatgtcgtagccggacgcatcgatgcgctggcgcacttcacgcagtttatccagcgtctggggaataaaggactggccgccaaagcccgggttaaccgacatcagcaggatcacgtccagcttatccatcacgtaatcgaggtagctcagcggcgtcgccgggttaaacaccaggcccgctttacagccgtgctctttgataagctgcaggctgcgatcgacgtgttcggaggcttccggatggaaggtgataatgctggcgccggcttcggcaaaatcaggaatgatgcggtcgaccggcttcaccatcaggtgaacgtcgattggcgcggtaataccgtaattacgcagtgacttcagcaccatcgggccaatcgtcaggtttggcacgtagtggttgtccataacgtcgaagtgcacgacatccgcacccgccgccagcgccttcgcggtatcctcacccagacgggcaaaatcagccgacagaatcgaaggggcaatcaaatactgcttcatccgcatctccttgaaatttatttggtcttaggcggacggtagagcgctaatagctcgtccacctttttacgcgtaccaccgttgctgctgatgctgcgccgcaccttcacaatatgcgtttctgccgcgtttttataccattcctgcgtcagcggcgtgcggtggttggaaatcagcaccgggatgcgctttttcatcagcgattccgccttttgcgccagcagtacctgttgttccaggttgaaactgttggtgtggtaggcggtaaagttcgccgtcgccgttagcggcgcatagggcggatcgcaatacaccactgtgcggctatccgcacgttgcatgcactcttcgtaagattcgcagtaaaactcggcgttttgcgccttctcggcgaaatgatagagctcagcttcggggaaatagggctttttataacggccaaacggcacattgaactcgccgcgcagattgtagcggcacaggccattgtagccgtgacggttcaaatacaggaacagcaccgcgcgacgcagcggatcctggctttggttaaattcatcacgatacaggtaatagcgctcagcgacgttattttccggggtaaacatctcacgggcggcggcgacgtattcgtcggtgcgcagtttgacgatgttgtacaggccgattaagtcactgttgatatccgcgaggatataacgagaaaagtcggtattaagaaataccgacccggcgcccacaaagggctcgatcaagcactcgccttccggcaaatgctttttaatatcgtcaagcagggggaactttccccctgcccacttcagaaaagcgcgattctttttcatgctgcctaactaattacacgttctccggctgtggagaaagctccgacagcatcctgcgcttaagactaccccacggcattatttcaggtcagcctgaacctgatgcagcggttttgcccatggatttttcgcctgcacgtccgccggcagcgaggtgacagcacgtttcgcttcatctttcgatgcatagataccgctcaccagcacgtaccatggttggccgttacgcgacgtttcatagacaacatatttatccagcttctctttcttcgcccagttgttgaggttgtcgtagttagaggagctgctgagctgcagagtatagtgacccgacggcgcagttttcattgagctgacgtcacctgccgtcttcccgctcttcgctgccggcgctgccgcagctgccgttgccgctggcgctgcggtcgtcgtggtcggtttgctctgagcggtggccaccggtttgctttcgctgacggacgttttcgccggagcggtggtcgccgtgctttcaacatgcttcggctggaccggcttcgattctaccggcgttttcgccacggcctgtggcttcgactgcggcttcgcttcgataacggtatgcttacgttcagccggacgcggggtcgctgctgtctgacgctcggtcgcctggcgcggcgccgcggtgccattggcgccattccggattggcgcgacggtagccggttcagtcggcagcgtcgagttagccacggcgccgtccagttggccctgctgctgggtcaacgcattgttcagatcgccctgaacttcgatacgctgctggccctgcggcgcagccgctgcctggccctgcgtcgggttcgcggcaataggcggtaccgttacgtcctgctgtgaggtgctgttagcggcggcagtctggtcctggcccgcagcaggcatgctggcggactggtcgtcagacagattaatgctcttctcgccggaagcggtctgctggctggaagatgatggcgatttcagtgcggaaccgatacccacgatcaacagcagcagcaccagaatccccacacccatcatgatgtactggcgggaggccggtttggccggcgcttttttacgcttgcgcggacgacgctctacaggctgctcttcgagcatctcctcgtcttgcgcatccagttcttcttcgaactcttcctcttcacgctcgcgacgggccttaccagcgcgcgtcggacggccttcatcggcatcaagatcaacatcgtcaaaattgatctgcggatcggcatcacgctcggaagactgacgggaacgaccagcacgacgatcgttgcgatcggctttcatatcgtcttctggtttgaaatcatccatttaacaccccactaaaaggcttatgctcacgattattgcacatcacccgaaatgataacgccgcgcgaacgcggccagaccttcttattgttgcgcctgctgagtatcagcaatcgcgccaagaaccacatcgtgcggcactccgccgcgcagctcgctgcttcctattgcgagcgggagcaccagccgcatttcgccagccagtacctttttatcgcgcatcatatggggcaaatacgcctgcgcactcatttcctgcgggccgcgtaccggtaagcctgcacgcttgagcagctcgataatgcgctgagtatcctgcgcgcggaactgccccagccgttcggacgtgcgtgccgccatcaccatacctgccgccaccgcttcgccatgcagccagttaccgtagcccatttccgcttcgatagcatggccgaaggtatgtccaagattgagtaaagcacgtaacccggtttcacgctcgtcggcagccacaacctccgctttcagttcacagcagcggcgaatgcagtacgccatggcggtatcgtccagcgccagcagcgcatcaatgttgttttccagccagctgaagaattcaccatccaggatcaccccgtacttgatgacctcagccagtccggaagcgagctcgcgcttcggcagagttttcagacagttaagatcaactaccacggaaaccggctgccagaaggcgccaatcatgtttttgccgagagggtggttcactgcggttttgccgccgaccgacgagtcgacctgcgacaacagggtggtagggacctggatgaaacgcacgccgcgctgatagcttgccgcggcgaaaccggttaaatcaccgatcacccccccgccaagcgccaccagagtggtgtcgcggccatgtggtttttgcaacagcgcagtaaacacggtatccatcaccgccaggcttttgtattgctcgccgtctggcagaatgacgctgtcaacgttgacccctgactgcttcagcgcagagcggacggtatccagataaagcggcgccagcgtttcgttggtgaccagcatagcctggtcgcccgacttgagtggcaggaaggaagctggatcgttaaacaaaccagccgcgatggtaatcgggtaactacgttccccgagggtaacagtaagcctctccataacgcgacatccacctcaatgactattactctgacgcacttttattaagccagaatcagttgctttccagcatatgaataatctggttcgcgacgactttcgcactctgatcgtctgtgcggatagtcacatcggcgatctcttcatacagcgggttacgctcgtcagccagcgcttccagcacttcacgaggcggcgcatcgacttgtagcaaaggacgctttttatcgcgctgcgtacgggccaactgcttctcgatcgtagtttccaggtagaccaccacgccgcgggcggagagacggttacgcgtttcacgggattttacagagccgccgccagtcgccagcacaatcccctgtttttccgtcaactcattgataattttctcttcacggtcacggaagccttcttcgccttcaacatcgaagacccagcccacatcagcgccagtgcgtttctcaatctcttgatcagaatcgtaaaattccatgttgagctgttgggctaactggcgcccaatagtgcttttgccggcacccataggcccaaccagaaagatattgcgtttctctgccattttttcggtactactaagactattcgttaatgataaacccgcttcgcagacacccagcgccgcagggcatgaactgaaacctcatatgcaatagagcgagagtcagactaaaaattatctcaatactccggctggtttggcaactgaataaaatcgccggacaataaagggaggattgatgtcgtacccgactctcaaatcggtaccccttgtatgctaaatccgtcctcacgtcaaacacctgaaacgtgtttagcatgaaaaacctgcttaacgtactgccagaatccgtggcgtaataaagacaaccagttcgcgacgttcattatctttcccgtcacgacgaaacagacgtcccagcaccgggatatcgccaagcagcgggacgctgtcgcgggcggttttgtttttctgcgaaaagatgccgcccaacgctaaagtctcgccgctgcgaacttccaccagggtctctatctcctgcttatcgatggccagcgcttcgccgttttcctgcttcagcacctggcctggcgtattctcgcttattcgcagcttaagccgcactcttccctgctgcagcaccgtcggcgtgacctccatgcccagcaccgcctctttgaactccaccgaagtggcgccgctttcgccactggaaacctgataggggatctcgcttccctgcttgatgctggcaggctgcatgtgggaggccaataaacgcgggctggcaataatttcgacctgctgcttgcgctccagcgcggatagctccagctcaagcaagcgaccgttgatcttgccgatgttaaaccctgcgcgggtgctggcatcgtttaccgatacatcgctgcttagggtggtgatttgcccggagcctggcgggcttccggcttccgcaagccgccacttcacccccagctcacgaaggctggtttcgctcatcgacacgatatgggcggccagctccacctggccgaccggcagatccatctcctgcgcccaggccttcaacgccggcaggtgccgggcatcatcgcggatcagcagccgattagtccgcttgtccgccatcaggtgtcccctggcgctgagcagctttccgccgcttttagccagctcttcagcgtcggcaaagtgcagggtcacgctctccgcctgcaggggcaggttctgcaggcgtttctcctgttcggcttcacgctgcgcctgatttgccttttgccaggcctgagtgtgcgcgtagatgaccgtcccctgctgttgcaaagagagacccgcgctatccgctaccgcccgcagcgcctggctccagggaaccttctgcagacgcagggagagcgtgccgctgacgtccggcgcgacgacgaggttcttatggttcatttcggccagggcttgcagcacctgggccactggcgcatcgtcaatcaccagcgaaaccggtttatcattgcgggcggcgggggccaccgccagcggcagcagcagaagcagcaggcttatccatcgcatcatgttgtttcccttcacgttgccagcgccacgctggcggttcacatcccgaagacgtgacgatgtccagctcaccggccgtcagccggctcacccgccagcccgtgggcaattgctcatccatgcgtacccgtcgccactttccgttcccatcctgcagaaaccccgtccagccagcctcatccccaaccgccccgccatagcgccattgcgaaagctgcgccgtgcggcagggatcctcaaccggctggaaagggtcacgctcggccgccagcagcgacagcggtagccacaggaagatccagcgtttaccgctcatcttccgcctccagcagcagtcgcaggcggagcgtctgcgtctcacggcccagcgaaaacgaacgcggattcatcccgcagcgcgccagccaggaaaaaagcgcgggtaccgttgaccaggacagggtcagctccatctcgccgccgcttccctgcggacgccaggcgataagcttcgctccggagagcggaatggctatgggcgaaaatgactgcgtgtcgatgcgcgccccgggattttcctcgccggggatgcgcagcgccatgatccgccgccactgcgtttgcaacgccgcatcacgggttaccgccgcctgcggcgggcgcagatcgcgccagagcgccacgccgcctcccgacagccccattgcgagcaggatcggcagccccgtccaggcgccccgaaggttaatccgcatcagcgcgcgctcccgtcagggtaaaactgaactgccaacgcccctcggcgtcgcgctgggtcccgccggcttttgccggcgcgaatcccgcgacgcgagtcagcgcagcctccacgctggttagcgcctgcaggttaagggccaggccgtccagcgtgaggagtacgccctggtactccagccgcgtcagccacgcctgcgcgggcagatctgccgccagcgcctgcagcctgggttgccaggcggcgatcgccgatctgcgctggtactgctggcgctgccgttgatgctgctgccacgcctcacgcatcgcctgctcgcgctgcttaagcgaagcgagcagctgcgcgtcggccgtcgtgtgaagcgtcgccaggaagtcgcgctgcagacgcgccgttcggctcaccagcaggcccatcccgcccagcagcacaatgccgatggttaacaacaggacgtagcgcaggcgctggcggcgacgcaggtcgcgccagggaagaagattaacgacatgcgtcatgccgcccgcctcccagcgccagcccaagggcaatggcgtaacgatcgccatcggctggcagcgggggctgccgacggtgaatcacttgccagacatcaaagcgactggcctcatcgcccgcgtcaatacacaggcgcagcggaacctgaagctgccccgccagctggcttaaggacccgacatcagcgcaggcgtcactgccccaggcctcacgggtcgcccacagccagcgcttttcatcccgccacgccaggccctggtctgccgcagtcatccaggggaaaaaggcgccgagcgcactggcatccggtacgatggccgccacccgcagccgcagccgccctgccagctcccgcagaacattgatatccagccgctgcgccgccgtaacctgccagccgtcatcccgcgaggtgggggcataatcaatacatagcgcggaggcaggcattgccagctgctggctcatggcgctggctacccacgtcgcctgttcccgctcccgcagggcgaactggggatacggaagacgcttttgcagtgtgcgcaccgcgggaaaggcgatactaacctgatgctgcgccggtagctcccgccgccaggcggccagccgcgaaccgagtgcgctgacgtccgccaccattccctgacgtaccagccccggcggcaatgggatacgccaccagcggcgcagcgcccagtgtgaacgttcatgcaatagcgcgacaatggcaatgctatcctgttggatatgcattccaagccgccagtttctgaaagccatgcttacgatctccttatccggcaaaactgcccggctatatcaatgcacctggcttgcctttatactaccgcgcgtttgtttataaactgcccaaataaaactaaatgggaaaacaccggtgaagttcgtaaagtatctattgatccttgcagtctgttgcgtactgctgggagcaggctcgatttttggcctctacaaatacatagagccgcaactccccgacgtcgcaaccctgaaggatgtgcgtttgcagatcccgatgcaggtctatagcgccgacggtgagcttattgcgcagtacggcgaaaagcgccgtatccctgtgacgttgcagcaaattccccccgagctggtgaaagcgtttatcgccaccgaagacagccgcttctatgagcaccacggcgtcgatccggtaggtattttccgcgccgccagcgtggcgatgttttcaggccacgcctcccagggcgccagcaccatcacccagcagttagcgcgtaacttctttctcagccccgagaagacgttgatgcgtaagattaaagaggcctttctggccatccgcatcgagcagttgctgaataaagatgaaatccttgagctgtatctgaacaagatctacctcggctaccgcgcctatggcgtcggcgccgcggcgcaggtctattttggcaaacctatcgaccaactgaccctgagtgagatggcggtgattgccggtctgccgaaagcgccttccacttttaacccgctctattcgatggatcgcgcgaccgcccgtcgcaacgtggtgctgtcgcgtatgctgagcgaagggtacatcacccaggcgcaatacgatgaggcgcgcagcgaacccatcgacgccagctatcacgcgccgaaaatcgccttctccgccccttacctgagtgaaatggtgcgccaggagatggtgaatcgctacggcgagcaggcctacgaagatggttatcgggtctacaccaccattacccgtaaaaaccagcaggcggcccagcaggcggtacgcaataacgtgctggattacgatatgcgtcacggctaccgcggcccggccagcgtactgtggaaagtcggcgaaacgccgtgggagacgaagaagatcgtcgattcgctgaagcgtcagtctggctacggtccgcttttcccggcggtggtcacctccgcgaatgcccaggaggctgtcgcgttgttggctaacggcgactccgtttcgctgacgatggagggcgtgcgctgggcccgtcgctttatctcagatacgcagcaaggggcgaccccgcgtaaagtcaacgacgttgtgcaggccgggcagcagatctgggtacgcaaggtgggtgacagctggtggctgtcccagctcccggacgtcaactcagcgctggtctccattaacccgcaaaacggcgcgattattgcccttgtcggcgggtttgactttaaccagagcaaattcaaccgcgccacccaggcgctgcgccaggtcggctccaacattaaaccgttcctctataccgccgcgatggataaaggcttaacgctggcaagtatgctcaacgatgtgccgatctcgcgctgggatgcgggcgcaggttccgactggcggccgaagaactcgccgccgcagtatgccggtccgattcgtttacgccagggcctggggcagtcgaaaaacgtggtgatggtgcgcgctatgcgcgccatgggcgtagactacgccgccgagtatctgcagcgctttggcttcccggcgcagaacattgtccacacggaatcgttggcgctgggctcagcctcctttacgcccctgcaggtcgctcgcggttattcggtgatggccaacggcggcttcctggtcaatcctttctttatcagtaagattgagaacgatcagggcggggtcctcttcgaggagcgtccgaaaattgcctgtccgcagtgtgatttaccggtaatttacggcgatacgccaaaatccaacgtgctggaaaacaaggatgtggaagatgtcgccacctccgcggaaccgcagaatggcaacgtgccgccgcagccgcagctggagcaggccaaccagtcgctggtcgcgcagagcggcgcacaggaatacgcgccgcatgtgattaacacaccgctggccttcctgatcaagagcgcgctgaacagcaacatctttggcgagccgggctggatgggcaccggctggcgcgccggacgcgatctgcagcggcatgacatcggtgggaaaaccgggaccaccaacagctcgaaggacgcctggttctcaggctacggaccgggcgtggtgacctcggtttggatcggctttgacgatcatcgtcgcgatcttggccggaccaccgcctccggagtgattaaagatcagatctctggctatgaaggcggtgccaaaagcgcccagccggcctgggacagctttatgaagagcgtgctggaaggcgttccggaagaaccgttaactccgccgccgggtatcgtcacggtgaatatcgaccgcagcaccggtcagttggcgaatgggggcaatagccgggcggagtactttattgaaggaacccagcccacccagcaggcagtccgtgaggtgggcaccaccctgactgacggcggcggtgaaacccacgaattgttctgacaaaaaaagcgcctgcgggcgcttttttattgctgcttagcgtggacgctcgttcagagtcggccctgggcctgcagccattcccgcactaaaaacagcgcgctgacgttacgggcctcgttaaaatcttcttcatccagcagcgacatcagctgcgccagcggccagcgcacctgcggtagcggctcaggttcatcgcccggcagtgactccggatagagatcttccgccaccatgatattcattttgctggagaagtaggagggggccatactgagcttcttcaaaaacgtcagcttattggcgccatagccaacctcttctttcagctcgcgattggccgcttcatccacggtttcacctggatcaatcagccctttggagaagcccagctcgtaggactccgtccccacggcatactcacgaatcaaaataatgtgatcatccacaatcggcacaatcatcaccgcttcacgggtggaaggccgcatacgttcataaacgcgacgcacaccgttgctgaactccagatcgacgctttcgacattaaagaggcgcgaacgggcgacagtttcaacattgagaatggtgggtttttgtaatgatttgctcattgtcatcggtctatgctgtgattaagcagtcattgtgcgatacgcaacacgctttcggcaatccaaattgctacttatttacagagttgtaaccttttccctgcagggggaaaagtaataaagataaaaaagtcaatagcttgaattcgctttgagaatttaccgatttctgcgctttaacgtttttggtaagcttgtgcgctgctgcatgacatattcactaccctgtaagcaggtgcgccgctaacactgcagcttgacgttagtcttcacgttcaccgacgatttcgtaagaaaaaaataactttgatgggatgggcatgggcacctttctgatattccttacagctctgctaatctgcgtattgctcatcggatggtggtatcgcgctcacgccagacgccgccgactccccctactgcacgcctttagcgacgctaccacgcggcagcttcctgcggatgagcgccaggctattgagaagtatgttgccgagttgagccacgcccagcaggtgccggcgtccggtgcgaccagcgcgcctgtcgctctggcgctgaacgaacagagtgataccgtctatgcggtgacacgcgccatcacccgctacgggatcaccaccgacgcgccgaataaatggcgctatttcctcgattcggttgaagttcatctgccgccgttctgggaacagcatatcaacgatgaaaacagcgtcgagctgatccccaccgacagcctgccgctggttatcacccttaacggtcatagcctgagcgactatcgccaggaagcgcaaagctacgccctggaacgcgcttcggccacccaggcctccattcgcggcgaagagagcgagcaggtagagttgcggcagatccgtcgggaaacgcctgaagaacacgctctgaatcgcccggacgggctgcgcgaagcgatcctgatcgtcgcctcctttctgttcttttatttcagcctgattgggccagctgtctttaccccctggctggtcgccgcaggtttgttgctgctcgccgccggactgtgggggatttatgccccgccgcgtcgcgccgcgctgcgcgaaatccattgcctgcggggcgtccctaagcgctggggattgtttggcgaaaacgatcaggagcagatcaataacatctcgctgggcattatcgatctcatctatccgcgccactggcaaccctggattgcccaggacctggggcagcagaccgatattgatatctatctcaaccgccacgtggcccgtcagggacgctacctgtcgcttcatgatgaagtgaaaaacttcccgctgcagtactggctacgcagcgcgattatcgccgccggcgccctggtggtggtgattatgctgtgggccagcgtaccgttgaatatgccgtttaagttcaccctgtcgtggctgaagggcgcgcaaacgattgaagccactaccgtcagccagctggaaaaagcccatgtgcgcattggcgatacgctgcgcctgaccggtaccgggatgtgtaacatccgcacgccgggcagttggtccgccaaagaggattcgccgttcctgcctttcgattgttcacagattgtgtggaacgacgcccctcctctgccgctgccggagtctgacattgtcagcaaagcgaccgccctgatgcagtccgtccagcgccagctgcacccggaaaccgacgatgattcccgcgtcagccctgccctacgctccgccattcagaaatcaggcatggtgctactggatgatttcggcgatatcgtgcagaaaactaacgatctctgctcggcaaaggatgattgcctgcggctgaagaatgcgttggtcaatcttggcaatacccgtaactgggaaacgttaaccaagcgcgccaccgccggtaagctggatggcgtgaacgtgctgctgcggccggtcagcgccgagtcgctggagaatctggtgaccacctcaaccgcgccctttgtgatacgcgaaacctcgcgggccgcgcaggcgctgaacagcccggctcccggcggttttcttatcgccagcgatgagggcagcgtactggtcaatcagccgtggccggcggtgagtctgtatgattatccggcccatgagcagtggggcgaactgcggcggctggccggtatgctcatgcatacccccttccatgccgaaggtatcgttaccaacctgtttactgacgccaacggcacgcagcatatcaacctgcatcgcatccccgaccgcagcggcctgtggcgttatctgggcatcaccctgctgctgctttcaatggtggggtgcatggcttaccacgccgttcaggccctgcgtcgttatcaacgccatcgtcagcgtatggaagagattcagaaatattacgaaagctgccttaatccggttttgctcccctcatctgactcgcaagattaattttcccggcgacagggtgtgataccctgtcgcccattttccgctcgctggagagtcatcatgcactttgatatcgcctggcaggaggtcgataccgttctgctggatatggacggcacgctcctggacctcgccttcgacaactacttctggcaaacgctggtgcctgaaacctggggggccgcccgcggcctcaatttgcaggaggcgaaagacgccatgcgccaggagtatcacgccgtgcagcatacgctaaactggtactgtctggattactggagcgagcgcctgggtttggatatttgtgcgatgaccagcgaacaaggtccgcgcgccacgctgcgcgaggataccgtgccgttccttgatgcgctcaaggcctgcggtaagcgacgcattctgttgaccaatgcccatccccacaatctggcggtgaagctcaaacacaccggcctggacgcgcaccttgatttattactttccacccacacatttggttatccgaaagaggatcagcgtctgtggcgcgccgtggcggaggaaactggccttgaggcgcacaaaacgctgtttgtcgacgacagcgaggcgatactggatgccgcgagggagtttggcattcgttactgcctgggtattaccaatcctgactccggactggcggaaaagcagtatctgcgccatccggggctgaatgattaccgacgactgatcccttcgcttaccccgaaggagaggcgatgaaagagaagcccaccgaaaccgtcagactggacaaatggctttgggccgcccgcttttacaaaacccgcgcgctggcgcgggaaatgattgaaggcggcaaggttcattacaacggacaacgtagcaaacccggaaaaatcgtcgaactcgacgccattctgacgctgcgccagggcaacgacgagcggacggtgcgcattatcggcattaccgaacagcgccgcccggcaagcgaagccgtcaacctgtatgaagagacggcggagagtatcgagaagcgtgaaaaaatggccctggcgcgcaaaatgaacgccctgaccatgccgcaccctgacagacgtccggacaagaaagagcgccgcgacctgatgagatttaaacacggcgagagtgaataactcgcgccagaaagagagatgattatgactcaacacgatcaattacatcgttatctgtttgaaaactatgccgtgcgcggcgagctggtgacggtgtcggaaaccctggaacagattctggcgaatcacacctatccccaaccggtcaaaacggtgctggcggagctgttggtcgccaccagtctgctgaccgcgacgctgaagtttgccggcgacattaccgtgcagctgcagggggatggccctttacagctggcggtgatcaacggcaataaccagcagcagctgcgcggcgtcgcgcgcgtgcagggcgagattgcggacgatgcggatctgaaaacgatggtcggcaacggctacctggtcattaccatctctccggaagaaggtgagcgctatcagggcgtggtcggtctggaaggcgatacgctggccgcctgcctggaagattatttccagcgttcagagcagctgccgacgcgccttatcatccgcaccggcgatcatgaaggccagccgatggcgggcgggatgctgctgcaggtgatgccggcgcaggatgcccagactgccgacttcgagcacctggcgacgcttaccgagaccattaaggcggaagagctgttcaccctgccggcaaatgatgtgctgtggcgtctgtaccatgaagaagaagtcacggtctacgacccgcagagcgtggagttcaagtgcacctgctcccgcgaacgctgcgccggcgcgctgaagacgctgccggatgaagagattgatagcatcctcgccgacgaaggcgaaattgatatgcactgcgactactgcggtaaccactatatcttcaatgccatggatattgccgagatccgtaataacgcctctccggccgatccgcaggttcattaatccccgcatctttctcaggcacagggcggcaatgttgtttgtcgcgttgtgcctgacttttaatttattcgcgagttgaatcgattttccctgaaagagttacgtaatttaatttcaggaaagcgattacattcacatttcagcagtttttttaattactttttaaccattgagaaacatctaaccccaccatccgtccatttcctgagataatccactccacttcgtgacaggagtcaccgtttttatcgtcattctgaggaatgtcgagatacgtaaatctatgagcctggtcgcggtcaatacccggcaattaaccctacaatttacagcagtacatcttggctaaggagcagtgacatgcgcgttaatcatggtttaaccccgcaggatctcaaggcttatggtatcaatgacgtccaggatatcgtccacaaccccagctacgacatgttgtttcaggaagagctcgacccgaacctggaaggctacgaacgtggcgtattaaccactctgggtgctatcgccgtcgacacgggcatttttaccggtcgttctccgaaagataagtatctcgtgcgcgacgacaccacccgcgacaccgtctggtggtccgataaaggcaaaggtaaaaacgacaacaagccgctttcgcaggaaacctggcagcatctgaaagggctggtgacccagcaactgtccggtaaacgcctgtttatcgtcgacgctttctgcggcgccaacgccgatacccgtctcagcgtacgtttcattaccgaagtggcctggcaggcgcacttcgttaaaaacatgttcatccgtccgagcgatgaagagctggctgaattcgagcccgacttcatcgtgatgaacggcgcgaaatgcactaatccgcagtggaaagagcagggcctcaattcggaaaacttcgtcgccttcaacctcaccgagcgcattcagttgatcggcggcacctggtacggcggcgagatgaagaaagggatgttctcgatcatgaactacctgctgccgctgaagggcatcgcctccatgcactgctcagccaacgtcggcgagaaaggcgatgtcgccattttcttcggcctctcaggcaccggcaaaaccaccctctccaccgacccgaaacgccgcctgattggcgatgacgaacatggctgggatgacgacggcgtgtttaacttcgaagggggctgctacgccaagaccatcaagctctctgaagcggccgagccagatatctatcacgccatccgccgcaacgccctgctggaaaacgtggtggtacgcgccgacggcacggtcgatttcgatgacggttcaaagaccgaaaatacccgcgtctcctaccccatcgaccacatcgacaacattgttaagccggtgtctaaagcgggtcacgctaccaaagtgatcttcctgacggccgatgcgttcggcgtcctgccgccggtctcccgcctgaccgccgaccagacgcagtaccatttcctgtccgggtttaccgccaaactggccggcaccgagcgcggcgtaaccgaacccacgccaaccttctccgcctgcttcggcgccgccttcctgtcgctgcacccgacgcagtacgccgaagtgctggtcaaacgcatgcaggcggctggcgcgcaggcttatctggtcaataccggctggaacggcaccggcaagcgcatctcgattaaagatacccgcgcgatcatcgacgccatcctcaatggctcgctggacaacgcggagacctttaccctgccgatgtttaacctgcagatcccgacggcgctcccgggcgtggatacccacatcctcgatccgcgcagcacctatggttccccggagcagtggcaggaaaaagccgaccagctggcgaagctgtttattgagaattttgagaagtataccgatacgccagcgggcgccgcgctggtggcggcaggaccgcagcgctaacgggcgcaaaggtgaaaaagccgggcttgcccggctttttattgtgcaacatcctgagcagctaaccgcgggcgcgatcagctctccctggcgggtttcatcggcgccagcatccggtgcaccggcagccaggcgcggatcagtaacccgccgcgttcgctggagccaatctccagccggccgttgtgattgtcgataatacgctgaacaatcgccaaccccagcccggtgccgctggtgctgcgggcactgtcgccgcgtacaaacggctgaaacaggtgctcccgctgctcaggtttaatccccggtccatcatcttctacctggaaccaggcccggctcgcttcgctgccgctgctgaccttgatccagccattgccatagcgggccgcgttgaccaccatattcgccagcgcgcgcttgatagacagcgggtgcatacgtaccggaatttcgccggcctgcagggcggtggcgatttcccgctcatagccactctccgcagcgatcacttcccccagcaccgcattcagatccgccagctccatcggcatctcctgcccggtgcgcagatagtcgataaactgctcgatgatggcgttgcactcttcgatatctttgttgatcgactccgcgagatagccgtcctgctcgcccatcatctcggtggccagacgaatgcgggtcagcggggttcgtaaatcatgactgaccccggccatcagcagcgtacggtcatcagccaactgcttcacgcccgccgccatatggttaaaggctcgcgtcaccgaacgcacttcggaggcgccatactcgcgcagcggcggcggaataatgccgcgcccgacctgcagcgccgcgtgctccagatccaccaacgggcggttctgaatacgaataaacagccaggcgccgcctatcgccagcagcatgatcgccagggtatagcggaacagcggcgagaagtcgccctgatggatctcggtcagcggcacccgcacccagatattgggcgacagccaggtcttcagccacaccacaggggagcttttattgacctctacccgcacctctgtggggccaccaagctgatgggccatctgctgacttaagaattcataatgctgcgcccagcgcaggcctgcgtcttccgccgcttcattggaatagagcgaaatccccagctcgcgataaatttcacgacgaaacgccgggggcaccaccagctgggtgccatcctccagctgcagtttgtcggtcatcagcatacgcacttcgtaggctaacactttattaaactgctggagactcggcaggatcgcgaaattcagtaccaccagataggtcgtcaccaggctgacgaacagcaaggtgacgatcaggagcagtgtgcgagcaaaggagctgcgcggcgaaaagcgcacgcgtttcatgccttagaaccgtccgggacgaagacgtagcccagaccccagacggtctggatgtagcgcggatgcgccgggtcctcttccaccatgcggcgcaggcgggagatctgtacgtcgatggagcgctccatcgcagagtattcgcggccgcgggcgaggttcatcagcttatcgcgcgacagcggctcacggggatggctcaccagcgccttcaggaccgcgaattcgccgctggtcaacggcatcggctcgtcttcacggaacatctcgcgggtgcctaaattcagtttgaatttaccaaaggcgataaccgcctcttcctgcgacggcgcgcccggcagctcgttcgcctggcggcgcagcaccgcccggatgcgggccagcagttcgcgcgggttaaacggcttcggaatatagtcgtcagccccgatctccagacccacgatccgatcgacctcttcgcctttcgccgtcaccataatgatcggcatcgggttactctggctgcgcagacgacggcagatagagagaccatcttcgcccggcagcatcagatccagcaccatcaggtggaaggattcacgggttaacagacgatccatctgttcggcgttcgccacgctacgaacctggaagccctgctcggtcagataacgctcgagcagcgcacgcaggcgcatgtcgtcatccacaaccagaatcttataattctcttgcattgtttgtactcccaaaggttcactgcaatagtcagtgcgtattctcaaaaaagcccggcgcgctcaccagctaaatctggtatatattccaggctaaattgttacaaagcatatttaacagcaggttaagtatacatttaatcataagacacagtatttatcctgtcggtattattacgcgctacaaattgtgcgcaacgacagacagtcagaaggttgaactcacgatgaaaacgccgctgatcacccgcgagggatatgaaaaactgaagcaggagatggactacctgtggcgccaggagcgtccggaagtgaccaaaaaggtgacctgggccgccagcctcggcgaccgcagcgagaacgcggactaccagtacaacaaaaagcgcctgcgggagatcgatcgccgggtccgctatctgaccaaatgtctggaacagttgaaaatcgtcgattactcgccgcaacaggaaggtaaagtcttcttcggcgcctgggtagagattgaaaacgatgaaggcgatatcaagcgctttcgcatcgtcggttacgatgaaatttttggccgcaaagactatatctccatcgactcgccgatggcgcgcgcactgttaaaaaaagaggttggcgatctggccatcgtcaacacgccggcgggcgaagccagctggtatgtcaacgagatcgaatacgttaaatagacaagaactttccgagagacgcccggcgcggctggtatttttagccgtcagtccgtataactagtccctgttttttgaccctaaagatgaattaaaagccatgatgaatgattcgctctgccgcattattgcgggtgaacttcaggccagagccgaacaggtagaagctgccgttcgcctgcttgatgaagggaacaccgtgccgtttattgcacgttatcgtaaagaagtcaccggcggtctggatgacacgcagctgcgtaatctggaaactcgcctcggctatctgcgcgaactcgaagaccgtcgtcaggcgatcctcaaatccatcgctgaacagggcaaactgaccgacgcgctggaaaaagccatcaacaccacgctcagcaaaaccgaactggaagatctctacctgccgtacaagccgaagcgccgtacacgcgggcagatcgctatcgaagccgggctcgaaccgctggctgacctgctgtggaacgaaccggcccacgatccggaagcggaggccgcaaaatatattgatgccgataagggcgtagccgacagcaaagcggccctggacggcgcgcgctatattctgatggagcggtttgccgaagacgccgcgctgctggcgaaggtccgtgactatctgtggaaaaacgcccacctggtctccaccgtcgtcagcggtaaagaagaggaaggcgccaaattccgcgactacttcgatcaccatgaaccgatcgccaccgtgccgtcgcatcgcgcgctggcgatgttccgcggtcgcaacgaaggcgtcctgcagctctctttaaacgctgacccgcagtttgacgagccgccgaaagagagccacggcgagcaaattattatcgaccacctgggcctgcgcctgaataacgccccggcggacagctggcgtaaaggcgtcgtcagctggacctggcggatcaaagtcctgatgcatctcgaaaccgagctgatgggcaccgtgcgcgaacgcgcggaggacgaggcaatcaacgtcttcgcccgcaacctgcacgatctgctgatggccgcgcccgccgggctgcgcgccaccatgggactcgatccgggcctgcgcaccggggtgaaagtggccgtcgtcgacgccaccggtaaactggtcgctaccgataccatctatccccacaccggccaggccgccaaagcggccgtcgccgtcgccgcgctgtgtgagaagtacaacgttgagctggtggccatcggcaacggtaccgcctcgcgtgaaaccgagcgtttcttcctcgacgtgcagaaacagttcccgaaggtcaccgcccagaaggtgatcgtcagcgaagccggggcttccgtttactccgcctccgagctggcggcgcaggagtttccggacctcgacgtgtcgctgcgcggcgcggtctccatcgcccgccgtctgcaggatcccctggccgagctggtgaaaatcgacccgaaatccattggcgtcggccagtatcagcacgacgtcagccagacccagctggcgcgtaagctggacgcggtggtggaagactgtgtgaacgccgtcggcgttgacctgaacaccgcctccgttccgctgctgacccgcgtcgccggcctgacccgcatgatggcgcagaacatcgtcgcctggcgcgacgagaatggtcagttccagaaccgccagcagctgctgaaagtcagccgtctggggccgaaagcctttgaacagtgcgcgggcttcctgcgtatcaaccacggcgacaacccgttggatgcctccaccgttcacccggaagcttacccggtggtcgaacgtattctggccgccacccagcaggcgctaaaagatctgatgggcaatagcagtgcgctgcgccacctgaaggcagtggacttcaccgatgagaagtttggcgtcccgacggtcaccgacattatcaaagagctggaaaaaccgggccgcgatccgcgtccggagtttaagaccgcgaagttcgccgatggtgtggagaccatgaatgacctgctgccgggaatgattctggaaggtgccgtcaccaacgtcaccaacttcggcgcgtttgttgatatcggcgttcatcaggacggactggtacacatttcgtcgctttctgaccggtttgttgaggatccgcacaccgtggtgaaagcgggcgacatcgtcaaggtcaaagtgatggaagtcgatctgccgcgtaagcgtatcgccctgaccatgcgtctcgacgagcagccgggcgacagcaacgcccgccgcggcggtggtcaggagcgcccgcagggaaatcgcccggctgcgaaagccgccaaaccccgcggtcgcgaggcgcagcctgccggcaacagcgcgatgatggatgccctcgccgcagcgatgggtaaaaaacgctaaactctccctgcccctttttcaggggcagtttttttcatgaccaggccatcgccatcacacgcaaaacaggttcagttgtttctgataacctgcttttattccacgcctgaaaggcagcgaaattaatattttcatttcgttaacttcagaaaccttaattaaacattagatcgccgaaataatatttcgcgcatttttgattacaggctgactttgcggcatatcaataaaaaggtgattttcactttaaaaatagcctgcagcgcatcatatgtattgatgataaaaaccattctcattatcatcgattacagaacgttttttcttttttcgttggctacggtccccggcgcaactgcctccaggcgtccggaaaattcttcttcggttagcgatagacaagtaggccctatgcaattcacacctgatagtgcgtggaaaattaccggtttttctcgcgatattagcccagcataccgtcagaaactgctctccctcggcatgctgcccggttcctcttttcatgtggttcgcgtggcgccgctcggcgatcctgttcatattgaaacccgacgcgtcagtctggtattacgcaaaaaagatctcgccttaatcgaactggaagcggttgcacaataacggctggcccggcacaagagtctgaaatatgcaaaaattaaccgttggtttaattggtaatcctaattccggcaagaccaccttatttaatcagctgaccggcgctcgccagcgcgtgggcaactgggctggggtgaccgttgagcgtaaagaggggattttcgccaccactgaccaccaggtcacgctggtcgacctcccgggaacctactccctgaccaccatctcctcgcagacctcgctggacgagcagattgcctgccactacatcctgagcggcgacgccgacatgctgattaacgtggtcgatgcctccaacctcgagcgcaacctctatctgacgctgcagctgctcgagctggggatcccctgcgtcgtcgcgctgaacatgctggatatcgccgaaaagcagcaggtgcggatcgatatcgacgccctcgccgcccgtctcggttgcccggtcattccgctggtatcgactcgcggacgggggatcgaagcgctgaagatcgccctcgaccgtcatcaggcgaacagcgatcttgagctggtccactatccgcagccgctgctgcgcgaagctgacctgctggcgcagcagatgtcagcgcagatcccgacccggcagcggcgctggctgggtctgcagatgctggagggcgatatctacagccgggcctatgccggcgacgccgccgataaactggatatcgctctggcgaatctcagcgacgagatcgacgacccggcgctgcacatcgctgacgcgcgctatcagaccatcgccgccatttgcgacgccgtcagcaataccctgaccgccgaaccaagccgcttcaccgccgcgatggacaaagtgatcctcaaccgcttcctcgggttgccgatttttctctttgtcatgtacttgatgttcctgctggcgatcaacatcggcggcgcgctgcagccgattttcgatgccggctcggtcgcgatctttgtgcatggcattcaatggctgggttacaccctgcacttcccggactggctgaccgtgttcctcgcccaggggatcggcggcggtatcaacaccgtgctgccgctggtgccgcagatcggcatgatgtatctgtttctctccttccttgaggactccggctacatggcgcgcgccgcctttgtgatggatcgcctgatgcaagccctcggcctgccggggaaatccttcgtcccgctgattgtcggttttggctgcaacgtgccgtcggtgatgggcgcccgcacccttgacgcgccgcgcgagcgtctgatgaccattatgatggcgccgtttatgtcctgcggcgcgcggctggcgatcttcgccgtcttcgcggccgccttctttggtcagaacggcgcgctggcggtcttctcgctctatgtgctgggcattgtgatggccatcctcaccggcctgatgttgaagcacaccattatgcgcggcgaagcctcgccgttcgtgatggagctgccggtgtaccacgtcccgcatatcaagagcctgattatccagacctggcagcgcctgaaaggctttgtgctgcgcgccgggaaggtgatcgtcatcgtcagcatcttcctcagcgcgctgaacagcttctcactgagcggtaaggtcgtcgacaacatcaacgactccgcgctggcctcggtgagccgggtcattacgccggtgtttaaaccgatcggcgtgcatgaagataactggcaggccaccgtcggcctgtttaccggcgcgatggcgaaagaggtggtagtgggtacgctgaacaccctctataccgccgaagatatccagaatgaggaattcaatccgcagaccttcagtctcggcgaagaactgctcgctgccgtcgatgagacatggcagggactgaaagacaccttcagcctcagcgtcctggccaaccccatcgaagccagcaaaggcgatggcgaaatggccaccggcgccatgggggtgatgggcagtaaatttggcagcgcggcggcggcatacagctacctgatcttcgtcctgctctatattccctgcatctcggtgatgggcgccatcgcccgcgaatcaagccgcggctggatgaccttctccatcctgtgggggctgaatatcgcctattcgctctcgacgctctattaccagaccgttagctttagcgatcacccgcgctacagtctggtgtgtatcctggcggtagtgttgttcaacgtggtgctcttcggcctgttgcgccgggcgcgcagccgggtggacgtctcgctgcttgccacgagaaaaacgccggcctcctgctgttccagcccggctggcgattgccactaaggagggactgtggcgtcgttaatggaagtccgcgatatgctggccctgcagggccgcatggaggcgaaacagctcagtgctcgcctgcagacgcctcagccgctgattgacgccatgcttgagcgaatggaagccatgggtaaggtggtccggatcagcgaaacgagcgagggctgcctctccggcagctgtaaaagttgccctgaagggaaagcggcgtgccggcaggagtggtgggcgctgcgatgaaaggagtcaggcctggtcgcgcaacgaggtaaaacgagtaagacagctatgaaaaacgggccagcaggcccgttttcttatgactggattatttataaacgtcagcgttcgcgtgtacggttttttcgtttttctgcccggcaatcaccacaaagtatttcccacccagctcatcggcttttttcgacagatcgcgtcgggcatccatcggcgacgtcgtcctggaggtcgtaatgctaccgaccttggtcagattcatcttcgccacgtcttctttttggatctctttcgcggcgaatgcgccgaaagagagggtgcctatcaccagagatgcaaccattcctgtaacaagtttcatagcctctactctccataaggttgttattgtaggtcacggtggcggattgaaataatcaaccaccgtaacaacctaagtattgctaggaatggcccttttaccatggcgcggcaaaaaaaattaccccagccgcctcttcagcgccagcagcggctcgcagaaggccgcgggatgggaaacaaacggcgcatgcgcggccttatcgaagaggattgactcgctttccggccacaggtcatccagcaacgggacgatcttgcgcggcaccagtccatccagccggccatacagccgcagaaacggcatcggcagcctgacaagcgcctgacgcagatcgacggttctgaggatctccagtccgccattcagcgcctcggcggaaggcatcggcagcgagagcaccgcctgctttaacgcccgcgcatcctgacgcgcgctctctgtgcccatggtttgcagggcgaggaatcgctcgacggtgcgctggaaatcgtcgctcagctgctgctgaaatccggccagcacctcgggcttgatgccgggccagtcgtcacgagccgcgaaacagggggaagaggcaaccgtcaccagcgcctgcacgcgttccggacgcataatcgcgacctggctggccaccagcccgcccaggctccagcccagccacaccgcctgtggaggggcctgctccagcacccgctgcgccatcgcctccagcgacatcgccccaaacccgccgctgcggccatagcccggcagatccaccaggtggagggtaaaatgcgaagccagctgcggcgtgatgcaatcccatacctgagcgttcagcccccagccgtgcagcagcacaagatgacaatctccttcgccgattgtttgccaccagatgtcgttcatccgttaccgttctctttttactggacagaaggccaaatatgctaacagcacacagcttatgctggctatgccaaatgccgctggcagtcgcccgctgggggatctgctcccgctgcagccgcgccctgctcgcctgtcccccgctctgcccgcagtgcggcctgccggcggcggcatcccgtcacccctgcggccgctgcctgcaaaagccgcctccctggcatcggctggtggcggtcaatgactatcgcccgccgctgagcggtctggtgcagcagctgaaatttcaccatcgcccggagctaggccccgccctcgcgcgtctgctgctgcagcgccttctgcagcgtgacgatttgccgccagtagacgctctggtcggcgtgccgctatggcatcgccgtcgctggcgccggggttataatcagtgcgacgaactgtgccgaccgttagcccgctggcgaggatgcgtctggcatcgcgaaggcctgactcgccagcgagccggcgccgtccaacattcgctcaatgcccgccagcgcaggcagaacctgaaaaatgcctttcagcttgaatttgccgtgcagggactccatatcgctctggtggatgatgtcgtcacgaccggcagcaccgtcgctgagatatcccgcctgcttttgcgaaacggcgccgcgacggttcaggtatggtgtttgtgccgtaccttgtagacccccgctgatgggcgtattataacccagtaaaatagtcaactattaggccaacgctatgatccgtatttccgatgctgcacaagcgcactttgccaaactgctggcaaatcaggaagaagggacgcaaattcgcgtatttgtgattaatcccggcaccccaaacgctgagtgcggcgtatcttactgcccaccggatgcggtggaagacaccgacacggcgctgaaatttgaacagctgaccgcctatgtcgatgagctcagcgcgccctatctggaagacgctgaaattgatttcgtcactgaccagctcggctcgcagctgacgctgaaagcgccgaacgccaaaatgcgcaaagtctctgacgatgccccgctgatggagcgcgtcgagtacctgctgcagtcgcagattaacccgcagctggcaggccacggcggccgcgtatcgctgatggagatcaccgacgacggtctggctatcctgcagttcggcggcggatgcaacggctgctcgatggtcgacgtgaccctgaaagaaggtattgaaaaacagctgctgaacgagtttccggagctgaaaggggttcgcgatctgaccgagcaccagcgcggcgagcactcctactactaaacccttcctccggcggcagcctgccgccggatcgccgtgatccattctgtgttaccgcgcaacatctctcgctaaacgaccggcaaaaaccggggaaagagtatgacttaagtctcatatttaacattttcccccgtcaggtgattctcaaccctcacatgttacccgtatcatccatttcaggcgccaccggcaaaaaaatagccagctatcctttctctgggtaaggataatgcaagcgtttacggtgccagactattttgctccctgacggagcggatgctctacaggttcgaactttgacgttacccataacaaattaaggccaggtaaatcatgccattagtcatcgttgctatcggggttgccctgttgttgctgttaatgatccgtttcaaaatgaacggcttcattgcgctggttctggtggcgctcgccgtcggattaatgcagggtatgccactggataaagtgatcgtctccatcaaaaacggcgttggcggcacccttggcagcctcgcgctgatcatgggcttcggcgctatgctcggtaagctgctggcagactgcggcggcgcccagcgtatcgccaccacgcttatcaataagttcggtaagaagcatattcagtgggcggtggtcctgaccggcttcaccgttggcttcgccctgttctatgaagtgggcttcgtgctgatgctgccgctggtgttcaccatcgccgcctcggcccgtattccgttgctgtacgtcggcgtaccgatggcagccgcgctctccgtcacccacggcttcctgccgccgcatccgggtccgaccgcgatcgccaccatcttccatgccgatatgggcaaaacgctgctctacggcaccattctggctatcccgacggttatcctggcgggaccggtgtttgcgcgcttcctgaaagggatagataagccgatcccggaaggcctgcataacccgaaagtgttcactgaagaagagatgccaggctttggcgtcagcgtctggacctcgctggttccggtgatcctgatggcgatgcgcgccgtggctgagatgatcctgccgaaaggccacgccttcctgccaattgccgagttcttcggcgacccggtgatggccaccctgattgcggtactgattgccctgttcaccttcggtttgaaccgcggccgctccatggagcagatcaacgataccctgacctcttcgatcaaaatcatcgccatgatgctgttgattatcggcggcggcggtgccttcaagcaggtgctggtggatagcggcatggataaatacatcgcctctatcatgcacgaatcgaacatgtctccgctgtttatggcgtggtctatcgccgcggtgctgcgtatcgcgctgggttcggcgaccgtagccgccatcaccgcgggcgggatcgccgcgccactgatcgccaccaccggcgtcagcccggagctgatggttatcgccgttggctccggcagcgttatcttctcccatgttaacgatccgggcttctggctgttcaaagagtactttaacctgaccatcggcgagaccatcaagtcctggtcggtgctggaaaccattatctcagtctgcggcctggtgggctgtctgctgctggggatggtggtgtaaggtcactcccgccacagaaaaaggccggtccgcgtgaagcgggccggccttttttatcggacatgctcttcgccgcgcagaggagcgcgcggcaggaagttatcaggaggcggctttcttgctcgccgccttgcgccgtttatccagatccttaatcagcttattgacccgttcatcggcaaacatctgctccagggtgacggacagcttccggcgccagttcgggtactcggtgctggtgcccggaatgttaaccggcgtcgccatctccagccagtcttccggctgcaggcccagcagggcgctgttgctgtcggcaatataacgctgcatcccccggttgaggatccccgtcatgctcatcagcgaggccttatggccggcgcgcttgggcagacagccgtacttatgcagcgcgtccagcagcccttgtttcgccagctcgcggtcctggtacagtccgcgcagcaccacctcatcaggatagaggcccagcgctttacctaacgtcagatcgccgctttcccagtagccgcggagagtgggcaggtcgtgcgtcgtcgccacagccattgattgctccgggtacagcgccggcgcgcggaacgttttctctgcatcactctcaaaatagagcaccttataagaatagacgccgctgttgcgtaacttgctgacgatctccaccggtaccgtgcccagatcttcaccgatcaccatgcagcgatgacgctggctttccagcgccagaagcgacagcagatcgtcgaccggatactgaacgtaagcgccatggtcggcggtttcaccatacgggatccaccacagacgcagcacagacatcacgtgatcgatgcgcaacgcgccgcagttctgcatattagcgcgcagcaggtcgataaacggctcataggcgcgggcggcaatgatatgcggatccatcggcggcaggccccagttctggcccagcgggcccagaatatccggcggcgcgcctacggatgctttcaggcagtacagttcacgatcgcaccaggtttccgacccgccctcggcgacgcccaccgccaggtcgcggtagaggccgatcggcatgccgtcacgctggctggtttcccagcaggcagcaaactgactccaggccagccactgcagccaaagatagaaactgacgtcatcctcatgctcaacgcagaaggctttcacctccgggctgtcgatatcctgaaaggccttcggccaggccggccagccccagcgcagcgggtcctgttgtacctgccaggcgtgcagcgcatcgaaagccgcctgccagtagaggctttccccttcgcgcagaacaaactcgcggaacgctgtcatctgctcatcttcacgacgagagaattgtttccatgccatacgcagcgcggtcattttcagcgtagtgacggcggtataatccacatcgtccgtttcccgcgccgcctgcagtgcctgctgcgttgccggagactgccaccacgcctgcgcctcttcgctacgctggaaatcttcaaccgcgttgacgtcgatataaataacgttcagccagcgacgtgaagacgggctataggggctggcgctctccgggttcgccggatagagggcatgaatcgggttaaggccaataaacgacccgccgcggcgggcgatttccggcagcatggcccgcagatcgccaaaatcgccgatcccccagtttttctcggagcgcagggtatacagctgcacgcaggtgccccacagctttttcccctctttcagcggctgcggctcatagcagcgggctggcgcgacgatagttcggcagtgccagcgctccccctcctgggtgagggtcagggagtggtacccctccggcagtttggccggcagcggcagcgtctcgccgccgcgggttttcccttgatactgcttaccgtcctcagtagtcaggatccactgatactcaccgcgtcctgccaccggcagcgacatttttttgccgtgagtgaaaattttcacgttcggcagcgggttaaccgccactttcgtggcggcggtagagcgatgcatcgcatccagcaggcgctgtttggtgacagccgcgatagactgcggcttgccgtgcgcgttgatatagctggggctgatgcccgccgccagcgcggcattatcgaggcgtttactctccataggccttcctttagcgtttcgcctgccagatacgttgctgataatcgcggatcgagcggtcggagctgaacatgccgcagcgcgcggtgttgaggatagccgcgcgggtccaggcctcctcgtcgcgatacagctcatctacccgtttttgcgccgctacgtaggcttcgaaatcggccagcaccaggtacggatcgccgccctgcagcaggctgtgcagcatctgatcgaaggcatgcttgtcgccgttgctgtaggtgccgttctccagctccttaagcaccgcatcgagcagcttgtcttttttacgccatttcagcggatcgtagcctttcgctttcagggctttcacctcttcaaccgtgtggccgaagataaagatgttctcctcgcccacctgctcagcgatttccacgttagcgccatccagcgtcccgacggtcagcgcgccgttcagcgccagcttcatgttgccggtgccagaggcttctttacccgcggtggagatctgctcggagatatccgccgccgggatcagtttttctgctgccgatacacaatagtccggcaggaagaccaccttcagcttatcgccgactttcgggtcgttgttgatcgcttccgctaccttattgatggcaaaaataatgtttttcgccagatagtagcccggcgccgctttcgcgccgaacaggaagacgcgcggtacgcggtcggactgcgggttttcgcggatctctttgtacagcgcaaggatatgcagcaggttaaggtgctgacgcttatactcgtgcagacgtttgatctggatatcgaagatcgcctgcgggttgatctcaatcccggtacgctgcttcacaaactcagccagatgaactttgttggcctgcttgatatcgcgataagtctgacggaacgccgcatcgtcagcatatttttccaggttgatcagctggtcgaggtcattggcccactcttttttcagcgtctcatccagcagcgaggccagcgccgggttgcactgcttgatccagcggcgcggcgtgatgccgttggtcacgttatggaatttgttcggccacagctggttatattccgggaacagatcttttaccaccagatccgagtgcagcgccgccacgccgttgacagcaaagccgcccaccacgcacatgttggccatccgaacctgtttgtcatgcaccaccgccagcttcgcccagacctgcttatcgcccggccaggttttgtccaccagctgtttaaagcggtcgttgatctctttaatgatctgcatatggcgcggcagcagcgcttttaccagcttctcatcccagcattccaacgcttccggcatcagggtgtggttggtgtaagcaaaggttttgctggtgatcgcccaggcgtcgtcccagctcagctggtgctcgtcgatcagcacgcgcagcagctccgggatggcgatggtcgggtgcgtatcgttcagctggatcacttcgtaatccgccagttcggccagcttgcggcctgccagatgatgacggcgcaggatatcggccactgagcaggcgcactggaagtactgctgcatcaggcgcagttttttaccggcctgatggttgtcgttcgggtacagcaccttggtcagtttttccgcgtcgatgccctgctgctcggcgcgcaggaaatcgccatcgttgaatttggtcaggttgaacggatgagcgtgtttggcctgccacagacgcagcggctgggcgacgttgttgcgatagccaagcaccggcaggtcccaggcttcgccggtaatgacgaacgccggctgccattcgccgtttttgctgactttcccgccgatacctacctggacatccagcgcttcgttatgacggaaccacgggtagctgctgcgcccccagtcgtcaggggcttccatctgctggccatcgtcaaatgactggcggaacaggccatactggtagttgagaccgtaaccggtcgccgactgccccaccgtcgccatggagtcgaggaagcaggctgccagacgtcccaggccaccgttacccagcgccgggtcagtctcttcttccagcagatcggtgaggttgacatcgtagcctttcagcgcgtcgctgacgccctcgtaccagcccaggttgagcaggttgttgccggtcagacgaccaatcagaaactccattgagatgtagttaacgtgacgctgtccttgcgccggtttcgctaccggctgcgccgccaggagttccgccaacgctccgctgactgcgcgccaccattgacgctgtgtcatctcggaagcggactgtaaaccaaaatgctgccactgacgcgtcagtgcagcctgaaactgagctttgttaaatgtagtctgtgacataatgagatccgggtcctttactaaaacgatggcgctagtgtgccgacctcccgattcatcgtcctcatcctgacggggattagacagggaggagtggcggggatgagcgaaaagtgtgatcctgaacactatagtgtgggcgagaaggcaaaaatatgctgtaaaaatcaccgcgatatgacaattgagaggttacctccggtagctaaaaatttgttacaggccaatacgcgtaaaaaatcttccagttcctcgccacgttattaacaaaataaatagagacccctgaagaaataagcacctttcatcgcattgacccgcaaaaaagattacttctaagaaatcgctgacaataatttaataaaaacaaacaactactcttagcgtaaaataaatccacccacactccgccagctaccgcctgaaaaccgcggccgaccagtcctgcctgcgattttttcccattctcagccaatgtcaaaatttgtgacatagagcaaattcaagagcataaacttcggacataacttgcaataaatttcataatcaccgaccttattagatattaattacgaagcgcaaaaaaaatcgcaacctctctcttgcacagcgaaatgtagaactatgttgattccgtccaaattaagtcgtccggtccgccttgaacacactgtggttcgtgagcgcttactggcgaaactttccggcgcgaacaattatcgtctcgtgctgatcaccagtcctgccgggtacggtaagacaacgctcatttctcagtgggccgcgggtaaaaacgatcttgggtggttttcgctggacgaaggcgacaaccagcaggagcgttttgccagctatctgatcgcggcgattcagcaggctaccggcaaccactgcgcggccagtgaagcgatggtgcaaaaacgccagtacgccagtctctcctctctttttgcgcagctgtttattgaacttgccgactggcagcgcccgctgtatctcgtcattgatgattaccatctgatcaataatccggtgatccatgacgcgatgcgctttttcctgcgccatcagccggagaatatgaccctggtggtcctgtcgcgtaacctgccgcagctgggcattgccaatctgcgcgtccgcgatcagcttctggagattggcagtcagcagctggcctttacccaccaggaggcgaaacaatttttcgactgtcgtctgacatcgcctatcgaagccgacgacagtagccggctgtgcgacgatgtcgccgggtgggccaccgcgctacaactcatcgccctctccgcccgccagaataactcctccgcccaacactccgcccgccgcctcgccgggattaacgccagccatctgtcggattatctggtggatgaagtgctggataacgttgacgcccgcacgcgcaactttttgctgaagagttctctgctgcgctcaatgaacgacgcgttaatcgtgcgcgtcaccggcgaagagaatggccagatgcagctggaggagatcgaacgccaggggctgttcctgcagcggatggatgattccggcgaatggttccgctatcacccgctgtttggcagcttcctgcgccagcgctgtcagtgggagctggcggttgaactaccggagatccaccgcgccgccgcggaaagctggatggcgcaaggtttccccagcgaggccatccaccatgcgctggcggccggcgatgccaaaatgctgcgcgatatcttgctcaatcatgcctggggcatgtttaaccatagcgagctggggctactggagcagtcgctggcggcgctgccatggtccaatctgctggaaaatccgcgcctgatcctgctccaggcctggctgatgcagagccagcatcgctacagcgaagtcaataccctgctggcgcgcgccgagcaggagatgagtgtggaaatggacaccgcgatgcatggcgacttcaacgcgctgcgcgcgcaggtggcgattaacgatggcgaccaggacgaggcggaacgtctgtcaatggtggccctggaagagctgccgctggccaactattacagccgcatcgtcgccacatcggtgcatggcgaagttctccattgtaagggaaagctgaccaaatccctcgccgtgatgcagcagaccgaacagatggcccgccgtcatgacgtatggcattacgccctgtggagcatcattcagcaaagcgaaatcctcttcgcccagggcttcctgcaggccgcctgggagagccaggagaaagccttccagctggtacgcgaacagcatcttgagcagttgccgatgcatgagttcctgctgcgcatccgttctcagctgctgtgggcatgggcgcgcctcgacgaggctgaagcttgcgcccgccaggggatggacgtgctatccacctatcagccgcagcagcagctgcagtgcctggcgctgatggtccagtgctcactggcgcgcggcgatctggataatgcccgcagccacctgaaccggctggaaaacctgctcggtaatggtcactatcacagcgactgggtctccaacgccgataaggtgcgagtgatctactggcagatgaccggtgataaaaccgcggcggccaactggctgcgccagacgccaaagccggagttcgccaacaaccacttcctgcagagccagtggcgcaacattgcccgggcgcagatcctgctgggcgacttcgaaccggcggaaatggtgctggaagagctgaacgaaaatgcgcgttcgctgcgtttgatgagcgatctcaaccgcaacctgctgctgctcaaccagctgtactggcagtcaggacgcaagagcgaagcgcagaaagccctgctggaagccctgacgctcgccaaccgcaccggttttatcaaccactttgtgattgaaggcgaggcgatggcccagcagctgcgccagctgatccagttgaacacgttgccggagctggagcagcatcgcgcccagcgtattctgcgcgacatcaaccagcatcatcgccacaaattcgcccactttgacgaagggttcgtcgagcgactgctgaatcatccggaggtgccggagcttatccgcaccagcccgctgacccagcgcgagtggcaggtgcttggcttaatctattccggttacagcaacgagcagattgccggcgagcttgacgtggcggccaccaccatcaagacccacattcgcaacctgtatcagaaactgggcgtcgcccaccggcaggacgcggtacagcatgcccagcagttacttaagatgatgggatacggcgtctgacgacgccgttgccgtttagcacagctccagctgaaggttgttatcagtgatcaccttcagcacgccggccggcggcagcacgtcggtatagaccgcatcgaccatactgatgctgcccatgttgaccatcgcattgcggccaaacttggtatggtccaccaccagcatcacgtggcgtgaattctcaatgatcgcccgcttggtgcgcacttcatgataatcaaactccagcagcgagccatcgctgtctacgccgctgatgccgagaatgccgaagtcgaggcggaactgcgagataaagtcgagggtggcttccccgatgatcccgccgtcccggctacgcagttcgccgccggcgagaataatgcggaagtcctctttcaccatcagcgtgttggcgacgttaaggttattggtcacaatccgcagatcgttgtgatcgagcagggcgtgcgccaccgcttccggcgtggtgccgatatcaataaacagcgtcgccccgtccgggatctcgctggccacccgccgggcgatacgctctttctccgccgtctgggtcgctttgcgatcgtgccaggaggtgttgaccgagctggagggcagcgccgcgccgccgtgatggcggaggatcattttctgttcggctaaatcgttcaggtcgcggcggatggtctgcgggcttaccgcgaactgctcaaccagctcttccgtgctgacgtaaccctgtttttttaccagctcgataatggcgtcatgacgttgtgtttgtttcatgaaatatccctggaaaaatgtcgcctacccgacccctgtcggtaagtctttatgcgcgttttcgcccatgtaaggtatcaacaaacgccatcgccaggccggtcgccagaccagccacgtgcgcgccgttggcgatcgccatgccgaaaacatcaaaccagccagcaattaaccatactaaagagaagagtatcaacccgcgctgcagataaataccgctctgcggatcgcgctcgccccgcagccagacgtagcccatcagcgcgtagaccacgcccgacaagccaccaaaccacgggccgctaaactggtgctgcacgaagccgctcagcagagcgctgatgacggtgatcaccaccagcttgccgctgccgatgcgcttttccaccgcgccgccaagataccaccaccatagcaggttgaagagaatatgcatcagcgagaaatgcatgaaagcatggctgaaatagcgccaggcttcgaactgcagcgaaggatcgtagggccaggccagccaaatcatcaccggctgatcgcccagcagattttgcaggatgaacaccgcgatgcagatcagcagaatcgcccaagtgaacggaccggcgttatgccgcagcgtggcaaagaaaggaaagcgctgatagcgcaacccgctattggtctgtccggactgccagctcgccgccagatagcgcgggtccgccgggttttcgagaaaacgcgccagctcagccctgacgcgcccggcctgactctcatcagccagccagacgtcgctctgggtatgctgctggatggtcaggataatcccctgcgtcgccatataatcgacaaacgcctgggccgcccgcgggttggcaaaagaggtaatcattaacatgcagcgaatcgcttattccacacaaagggggatagtatacctgccagtcgttaaaacgtcccgcgcgccacttccgccgggaaatggcgatgccaggcgtcgaacccgccgtcaacgctatagaccttatcaaacccctgctgcagcagatactgcgcggcgcccttgctgctgttgccgtgatagcacatcaccatcaccgccgtgtcaaagtcgttgtcacgcataaacgcgcccagcgtatcgttggtcagatgaaacgcgcccggcgtatgacccatcgcatagctttgcggatcgcggatatcgaccagtaccgccgtctgctgatgcagtttctggtgcgcttcttcaacattgatgcattcaaactgttccatgattctcttctctttctcgtcatgacgggcgatggccggcccaattttaccctgtagtgtaccgtcaggcggtaaagaaacgccaatatgttacacccatcacttcaaaatgtttttttgatgttaccaaaagcgcgtttgtttgctatagtgagcgatatcgagcatttatgagcttaaacgaaagtgtgagagggtaagaacgtggaaaccaaagatctgattgtgataggcggaggcatcaacggtgccggtatcgcggcagatgccgccgggcgtggtttatccgtactgatgctggaagcgcgcgatctcgcctgcgccacctccagcgccagttccaaactgatccacggcgggctacgctacctcgaacactatgagttccgtctggtcagcgaagcgctggccgagcgtgaagtgctgttaaaaatggccccgcacatcgccttcccgatgcgctttcgcctaccgcatcgcccgcatctgcgcccggcatggatgatccgtatcggcttgtttatgtacgatcatctgggcaaacgcaccagcctcccgggatccaccgggttgcgttttggcgcagaatcggtacttaaaccggaaattgtgcgcggtttcgaatattccgactgctgggtcgacgatgcccgcctggtgctggccaacgcgcagatggtcgtccgcaaaggcggcgaagtgcgtacccgcacccgcgctatctcggcgaaacgtgagaatggcctgtgggtggtggaagcggaagatattgatagcggtgagaagtttacctggaaggcgcgcggcctggtcaatgccaccggcccatgggtcaaacagttcttcgacgaagggatgcatctgcgctcgccttacggcatccgtctgatcaagggcagccacatagtggtgccgcgggtgcatacccagaaacaggcttatattctgcagaacgaagataaacgcatagtgtttgttattccgtggatggatgagttctctatcatcggcacgacggacgtcgagtataagggcgatccgaaagcggtggccattgatgataaagagatcaactatctgctgaacgtctataacgcgcactttaaaaagaccctcagccgggacgatatcgtctggacctactccggcgtccgtccgctgtgcgacgacgagtcggattcgccgcaggccattacccgcgactataccctggatattcacgatgagaacggtcaggcgccgctgctgtccgtcttcggcggcaagctgaccacctatcgcaaactggccgagcatgcactggaaaaactgaccccctattacaaagggatcggcccggcatggaccaaaaccgcggtgctccccggcggcgatatcggcggcgaccgcgacgactacgcggcaaaactgcgccgtcgcttcccgttcatcagtgaatcactggcccgccattatgcccgcacctacgggagcaacagcgagtggatcctgaaggaagccagcgccctgagcgatctcggggaagatttcggccacgagttttatgaagccgagctgaaatatctggtggagcacgagtgggtgcgcagcctggatgacgccatctggcgtcgtaccaaacagggcatgtggctgactgccgagcagcaggcgcgcatcagcgaatggctggcgcagcatgcgggaaagtctgaactgtcgttagcgtcctgacatcgcgcggcgccaggagagaaatacccgggctatggcttgcgcttggcccggatacctgttcacaaattaaacgagactttttttccagtcggcaatgtgacatttatactgagttctcccccccatgccgcaatgtagcgttttagggtcgaaagccgagggtcgttatcagcctgttccattttagcgatcgttggctgctttacccccatagccgcagccatctctgtttgcgacatttgcaactcttctcgaagcaagtttaaagcgacagactggcgtatctctgccgctttcgctgcaatacgctgctggctatcaggactctgtttcgccatgagttcttttagcgtggccattatcgctccttagtcaggtgttggctgaattctctgtcagccagagtaatcatctctttgtaaaaacgtttctcattcatgccatccttattgcccgcacataaaacgatagctttccgcagaggatcaaaagcaaaaaaggcgcggatggggagcccatgatgctgaacccgcagttctttcatattctgaaacgttgaatctttcaccgtatcaacatacgggcgcccaagctgcggagcaaactcagacaggatgagcatcgtggccaacatatcctcttttaaagctctactttgtaattcgaaccaggtatcaaacgtatccgtcgtttctacatcccacataggctatgaacgtaaacttattgagcatttatcgtactgctggcgaattcacgtcaatagtatattcccgcaatagcctgaatcctccccggcacttttccgaataaaacgttcgccacacaacacaacggggccaaatggccccgttgtgttgtgtggtgttgcattgactggcttacagccttaccgggtcgatatgccagatatatttcgcgtactcctggatcgtccggtcagaagagaagtagcccatgttggcaatattcaacattgccttataagcccactcttccgggttttgatacagctcgtcgacgcgatcctggcaatccacatagctacgatagtccgccagaacctggtagtggtcgccaaagttaatcagcgaatccagcaggtcgcggtagcgccccggttctgccgggctgaagacgccggtaccgatctgcgtcagcgcctggtggagctcttcatcctgctcgtaatattcgcgtggtttatagccgctgcgacgtagctcctccacctcttccgcggtgttaccgaagataaagatattctcttcgcccacgtgctcctgcatctccacgtttgccccatcaagagtgccgatagtcagcgcgccgttaagggcaaacttcatattactggtgccggaagcttcagtgcctgcgagggagatctgttccgacaggtctgccgccggaatgatcagctgcgccaggctaacgctgtagttggggataaagacgaccttcagcttgtcgccaatctgcggatcgttattaatcaccgccgccacatcgttgatcaggtgaataatgtgcttggccatgtagtaggccgaggccgccttaccggcgaaaatattcacccgcggcacccactcggcctgcggatcggccttgatccggttatagcgggtgatgacgtgcagcacattcattagctgccgtttgtattcatggatacgtttgatctgcacatcaaacagcgccttcggattgaccaccacattgagctgttgagcaatatagctggccagccgctgtttgttctcaaacttggcctgacgcaccgcctgattgaccatcgggtagtcgatatgctgtttcagctcatcaagctgactcagatcggtccgccaggtgcggccgatatgctcatccagcactttcgacagcggcgggttggccagcgccagccagcggcgcggcgtcacaccgttggtcacgttgataaagcgcattgggaagattttggcgaattcggcaaacagtgactccaccatcagtcgggaatgcagctcggacaccccgttgaccttgtggctgaccactaccgccagccaggccatccgcacacggcggccgttagactcgtcgataatcgaggtgcggctgaggaggtcggtatcgttcggatactgctcctgcaaagtcttgaggaaatagtcgttaatctcgaagataatctgcagatggcgcggcagaattttacccagcatatccaccggccaggtctcgagcgcttcgctcatcagggtgtggttggtataggagaagacctgacaggtcacctcgaacgcctcgtcccagctgaacttatgttcgtcgataagcagacgcatcagctccggtatcgacagcaccgggtgggtgtcattcaggtgaatggcaatcttgtccgccaggttgtcataggttttatgcaacatgtaatggcgactcaggatatcctgcaccgtggccgacacgaggaaatactcctggcgcaggcgcagctcgcggccggagtaggtcgagtcgtccggatagagcacgcgggagacgttttcggagtggtttttatcctctaccgcggcgaagtagtcgccctggttgaatttaccgaggttaatttcgctactggcctgcgcgctccacagacgcagtgtgttggtggcgtcggtgtcaaagccggggatgatctggtcgtaggcttccgcaatgatctcctccgtctcaatccagcgggttttctttccttcctgctgaatgcggccgccgaagcgcactttatagcgggtgttgtggcgctcaaactcccacgggttaccgtactccagccagtagtcaggagactctttttgccggccatcgacaatattctgtttaaacatcccgtagtcgtagcggatgccgtaaccgcgtcccggcagacccagcgccgccagggagtcaaggaagcaagccgccaggcggcccagaccgccgttgccaagcccggggtcattctcttcatcgatcagctcttcgagatcgagccccatctccgccagcgcgctgctcacatcgtcataaatgcccagcgacagcagcgcattcgagagggtgcggccgatcagaaactccatcgacagatagtacacctggcgcacttcctgggagagctgcgcgcggttggagcgcagccagcgctccaccatgcgatcgcgaacggcaaacagcgtggcgttaagccattcatgcttgttggcgatggccggatctttaccgatgataaacatcagtttataggcaatagaatgctttaacgcctcaacgctcagcgtcggtgatgcatagctaaagggtacattcataacaatgactccagtggttacatcaagcgttgataaagttcgcgataggagttcgcggcaacctgccagctaaaatccatattcatcgcctgacgctgcacgtagcgccagagcgacgggcgcgaccagaggacaaaggcgcgacggatagcgcgcagcaatgacagcgcattgctgtcctcaaagacaaaccctgtcgccagaccatcggccagattctccagcgaactgtcagcgacggtgtccgccagaccgccggtgcggcgcaccaacggcagcgtcccgtacttcagaccatacagctgggtcaggccgcagggttcaaagcggctcgggaccagaatgacgtcggcaccgcccataatgcggtgggagaaggcctcatggtagccaatctgcacacccactttgcccgggtgttcggcggcggcggcgaggaaaccttcctgcagcaccggatcgccggcgcccagtagcgccagctggccgccctgctcaagcagacccggcagcgcttcaagcaccaggtccagccctttctggctggtaagacggctgacgacggcaaacaacggcgctttatcatcgaccttcaggcccatggcaatctgcagctgacgcttgttctccgccttctcctccagcgtgtcgcgatcgtagcgcatcggcagcagcagatcgttttgcgggctccagataccgtcgtcaacgccgttgagaattcccgacagccgaccttcatgatggcgctggcgcagcagcccctccatgccgtaggcgtactgcggctcggtgatctcgcgcgcgtaggtcgggctcaccgccgtaatatggtcggcgtagtagaggccggccttgagaaacgagatctgcccgttaaactcgaggccatgcatgttatagaacgaccaaggcagctcaatgtcattcatatgccaggagtaaaacatcccctggtacgccaggttgtgcacggtaaacaccgatttagccgggcgtccgcgcgccgccaggtaggccggcgtcaggccggcgtgccagtcatgggcatgcaccacatccgggcgccagaacggatccagtccgctggccatttcacttcccacccagcccagcagcgcaaagcgcaggacgttgtcgggataagcgtgctggttggtatcgtggtaagggctccccggacggtcatagagatgcggggcgtctatcaggtagatccccacgccgttaaagtggccgtacagcagcgtgatccgcccggcgaaggtatcccggcgggtcaccacctgggcatccaccacgccgcgacggatatcgggaaacgccggcaacagcacgcgcgtatcgataccctccgcgatttgcgccgccggcagtgcgccgatgacgtccgccagaccgcccgtctttaacagcgggaacatctcagaacatacatgtaagacctgcattagcgctcctgtttgtgccctaatttccgcagcatgtcgcgggtcaccagcacgataccttcctctgagcgatagaagcggcgtgcatcctcttccgcattctcaccaatcaccattccttccgggataacacaggcgcggtcaatcacgcagcgacgcaggcggcatgagcgccccacccagacatctggcaacaagactgccgaatcaatgttacagaacgaattcacccgcacgcgcgggaacagcaccgactgcaccaccaccgacccggagataatgcaccccccggaaaccagcgagttcaaggtcatgccgtggctaccggagcggtcctgcacgaacttcgccggcggcagcgattccatatgggtgcggatcggccagttctggtcgtacatatccagctccggcgtgactgacgccagatcgaggttagccttccagtaggcttccagcgtccccacgtcgcgccagtaaggttcggcgttcgggtcggactgcacgcaggagagcgggaaaggatgtgcataagccatgccagcttcggtgatcttcggaatgatgtctttaccgaaatcgtggctggagttctcgttgcgatcgtcttcttccagcagctcataaagataggcggcgtcaaagacataaatgcccatgctggccagcgatttggtcgggtcggtcggcatcgccggcgggttggcgggtttctcgacaaactcaatgattttttcgttttcgtcgaccgccatgacgccgaaggcggatgcctcttcaatgggcaccggcatgcaggccacggtgcaacgcgcccctttttcgacatggtcgatcagcatgcgcgagtagtcctgcttataaatatggtcgcccgcgaggatcaccacgtactcggccttgtagcggctgatgatatccaggttctgcgtcaccgcatccgccgtgccgcgataccaattttcgccatgcacgcgctgctgagccggcagcagatcgacaaactcgttcatctcttcgctgaagaacgaccagccgcgctggatgtgctgcaccagcgtgtgcgactgatactgggtaataacgccgatgcggcggatccctgagttaatgcagttagataatgcgaaatcgataatacggaacttgccgccaaagtgaacggcaggtttcgcacgcttaatggtgagatccttcagccgggtgccacgcccgcccgcgaggatcaacgccacggatttgatgggtaattgacgcgccagcatcagcggatcgtttttttcaagcctaaccatgattaactcctttttacacccccgctttccagctcatcccgccgcgccgccgccacgggtccaaccgaaagcttcagggcttacgacctttgaaatacgcacactccgtgcgcgggcccatgccagacagccatgatgaccggattatcctctccggcgaatggaggaacggcgcgccattccccctcgggtaaaaccatatccaccacctctgcggtggcgttcagcgtgagcagccagcgatccgacaactggatctgcatacacgcggccccctgctgccactccgcggcagtcaggggctgggcgttgcgattaagccagcggacgttgccatccccctcctgccaccagcggttgcgggtgagcgccggaatacggcgccgcaggtggatcagcgccgcggtaaaggcggttaatcccgggttcgcctggcgccagtccagccacgtcagggcgttgtcctggcagtaagcattattgttaccgtgctggctgtggccctgttcatcgcccgccagcagcattggcgtcccctgagccagcagcagcgtcgtcagcagcgcatgcgcgctggcgcgccgccgttcaatcaccgcaaaattcgcttctaatccttctataccatgattgttgctgtagttattgttagtcccatcgcgattctcctccccgtttgcctcattgtgtttctgattgaaacaaacgcagtcgcgcagcgtgaagccatcgtgggccgtcaccaggttgaccgtcgccgatggcggtttgccatcgcgggcaaagagatcgctggaggccgcgaaacgttgggcaaaatcccccagggagacattttgctgtaaccagaagcgtcgggcgctatcgcgaaaatggtcattccattcagcgaacagcggtgggaaattacccacctgatagccgcccgggccgatatcccagggttccgcaatcagtttcacctgcgacagcacgctgtcgcggcggatagcctcgaacagcggcgcatcctggcggaattccggcgtccgccccatcactgaggcgaggtcgaagcgaaagccgtcgacatggcactcatccacccaaaagcgcaaacactggcgcgcccactccaccacgccggggtggctaagattgagcgtattaccgcacccggtccagttgtgataatcgccatcctcccttacccaataatagctacggttgtcgattccgcgcagggagacggtgggcccttctagatcgatttccgcactatggttgagcacgatatccagaatcacttcgataccggcggcgtgcagcgccttaaccgcatcgcgaaactcatcgagggcgcgatccgggtcgctggcatagcgcggatccagcgcgaaccacgccaacgggttgtagccccagtagttgcttaaccccatccgctgcagtcgcggctcgctggcgaactgcgccaccggcaacagctcaagggcgctgatgcccagcgatttgaagtaagcgatcatcgccgggtggcccagcgctttataggttccgcgaatggcttccggtagctgcggattaagcaaggtgagccctttcacgtgcgcttcataaatcaccgtttccccccatggggtacgcggcggtttatcgccacgccagtcatagcgcagatccaccacctgcgattttggcgcgaccgcggcgctgtcgcggcgatcgggctgccacatgccgccgtgcaggcgctcatcgtcaggcagatcgccctcgacccggtgggcgctgggatcgatcaacagcttggccgggttaaagcggtgcccctgcgccgggtcccagggaccatgtacccgatagccgtagcgcaggcccggcccggcggcggccagccagccgtgccagatgtcgccgctgcgcgccgggagatcgaagcgttgctcgttgccctgctcgtcgaatacgcacagctccacccgctccgcatgggcggagaagagggcgaaattcacccccttgccgtcatagctggcgcccaatggcgcaggtttgcctgccgcgagtgaggtcattgcgcctcccggaccagccagatcgtcgccagcgggggcagggtcagcgacagcgaatgttcgcggccatggctggcgatagcgtcgctttccaccacgccgccattgccctgattgctgccgtgatagtgcatggagtcggtatttagcgcctcgcgccagcggcccggctggttaatgccgaagcggtagtcgtggcgcggcaccggcgtgaagttgctggcgacgataatctcgttgcccgcccggtcacggcgtacaaagacaaacaccgagcgctcatggtcgtcgaccaccagccattcgaagccataggggtcaaaatccagctcgtgcagcgctttatgatgacggtaggtatggttcaggtcgcgcaccagccgctggacgccgtggtgccagttgtcgccgccctccagcagatgccagtcgaggctaacgtcatggttccactcgcggccctgagcgaactcattgcccataaacagcagctttttccctgggaaggcgaacagccagccgtagtaggcgcgcaggttggcgaacttctgccaggcatcgcccggcatgcggtcgagaatcgattttttgccgtgcaccacttcatcgtgggagagcggcagcacaaaattctcggtgtagttgtagagcatgccgaaggtcattttgtcatgatggtagcggcgatgcaccggatcgagcttcatgtaatccagggtgtcgtgcatccagccgaggttccatttgaaccagaaaccgaggccgccgccggctggcggacgggtcaccccggcaaaatcggtggactcttccgccatggtgaccgcgcccggcgtctgttcgccaaggatgcggttggtgttgcgcagaaactcaatggcttccagattctcccgaccgccgtattcgttggggatccactctcccgccttgcggctgtaatcgcgatagatcatcgaggccaccgcgtcgacccgcagcgcatcgatgccgaagcgttcgatccagtacagcgcgttacccaccaggtagttgctgacttcccgacgtccgtagttgtagatcagggtattccagtcctggtgatacccctcgcgcggatcgctgtgctcatacagcgaagtgccgtcaaacgaggcaagggcaaaatcatccgccgggaagtggccgggcacccagtcaagaatgacgttcagcccggcggcgtgcgcggcattgataaagtaacggaaatcgtcgcgggtgccgaagcggcgggtcggcgcatagagcccggtgggttggtagccccagctgccgtcgaacgggtgctcgttaaccggcaatagttcgagatgggtgaagcccatccatttcgcatagggcaccagctggtcggccagctcgcggtagctcagccagaaattattatcggtatgacggcgccaggagccgagatgcacttcatagatagagatcggggcatcaaactggttcgccgctctgcggtccgctggctgttccactttgggcggcaggtcgcagataagcgaggcgctttccggacgcatttgcgactcaaaggcgtaagggtcggctttgacccgcagattgccgtgggcgtcaatcagttcgaatttatacagctggccattatgcgcgccgggaacgaacagctcccagatcccggactctttgcggaatcgcatcgggtggcgacggccatcccagtagttaaactgccccaccaccgatacgcggcgggcgttcggcgcccacaccgagaaacgggtaccggtgacgccatccatggtggcagcgtgcgcacccagagtttcataagggcgcaggtgggtcccttccgacagcagccagacgtcaaggtcctgtaacagcggaccaaagcgataagggtcatcgatcagattctgctgcccgtgccaggtgacggccagctgatagcgaaaagcatttttacgccgcggcaggacgccgctgaagaaaccacgcgagtcgagacattcgagcttgccgactttgcgtccggttttcggttcaataacccacacgtcggtggcatcgggtaataatgcgcgcacttccagcccggcgtcagtacggtgcatgccgagcacggaaaagggatccgcgaaatgaccggcgattagcgcattaatcacgtctctatcaatatgattagacatgctttcatcctgttgtaagtgtcgctcattcctgtaactggcgactttttttgacctgaacggcgcagtgctctcagcatcctcctgctccgtcccaccttcaggtaaggaattccttacttaaagcatagccaaggctgagttacctccgtggggaaaaatctaacatccgcgtttactccttgtattacgcaaaaaaaaagggggcttgaagaccccctttctgttcatcctgggcttacgccagctggcgaagcatccggcgcagcggctccgcggcgccccacagcagctggtcgccaacggtaaaggccgatagatactccggccccatattcagtttacgcaggcgtcctaccggggtggtcagggtgcccgtcaccgcggccggggtcagctcgcgcatggtaatctcacgatcgttcggtaccactttggcccacgggttgtgcgcggccagcagctcctcaacggtcgggatagaaacatctttcttcagcttgatggtaaacgcctggctgtggcagcgcagcgcgccaacgcgaacgcagaggccgtctaccgggataacggacgaggtggcgaggatcttgttggtctccgcctggcctttccactcttcgcggctctgaccgttatccagctgtttgtcgatccacgggatcaggctacccgccagcggtacgccaaagttatcgaccggcagctcgccgctgcgggtcagcgacgtcactttgcgctcaatatccaggatggcggaagccgggtccgccagctccgcggccacatgattatgcagctgccccatctggctcagcagctcgcgcatatgacgcgcgccgccgccggaagccgcctggtacgtcgccacgctgacccactccaccagatcctgagcaaacaggccgccgagggacatcagcatcaggctgacggtgcagttgccgccgacaaaggttttcacgccgttgttcaggccggcggtgatcacgtcctggttaaccgggtcgaggataatgatcgcatcgtccttcatgcgcagcgaagaagccgcgtcaatccagtaaccctgccagccgcttgcgcgcagcttcgggtaaatctcgttggtgtaatcgccgccctggcacgtgacaataatgtccagcgccttcagcgcgtccagatcgaacgcatcctgcagcgtgccaccggtgctaccgccgaatgacggcgctggctgtcccagctgggaggtagagaagaacaccgggcgaatggcgtcgaaatcgcgctcttcaaccatgcgttgcatgaggacagagccgaccattccgcgccagccgataaaaccaacatttttcataacgtattcctgcgaggtgtgtgctgtttgtgcctggccagtttccaactggattatccctcaccttacaaaatgcagctaaagtcgcaagtgaaattaatcaatgattgctgaacaatcagaaaagcaacttatcctgcacattgtccaccgtcgctggtcgtcgtcaaaagcgcaacgattatcggggaaatcccccggggaatggaatattttccgtcgctattttattgatcctgattatggattaagcgtgaaatctggtgcttttccgcttgccaaaaaaaagcgacaaacccagtcacagcaagggctgacgagggatacgagcatcgtcgtagcactaataagggccaatagctggtaaggaaaagagggaaaaagggcggcttattgcaaagaagccagggtaagcagcgttaccctggctttttatttcccgcgagcgggagatgagcgggcttagctcagcagctggaaggcgatcataccgacaatcgccccggtggtgccaaggatggtttccatcatggtccaggtcttcagcgtctgggcttcactggcgccggtaaatttaccgaacagccagaagccggcgtcgttcacgtggcttaccacaatcgagccgccggcgatacagatagacaatgccgccatctgcgcgccgctgtagttcagctgctcaatcaccggcatcaccaggccgaccgccgtcaggcacgccacggtggcagagccctgaatgatacgcaccgccgccgccagtacgaagcaggtaatagcgatcggcagccccattccggtcagcgcttcaccaagcgccgggccaacgccggagtcaaccagcacctgcttgaagacgccgccagccccgatcaccagcagaataatcccggccggctgcagcgcgtggccgcaaatctccatcacccggtctttcgccattccctgacgtaccgccagaccgtaaatcgccaccaggcaggccaccaggatcgcggtgaacgggtggccgataaactcgaaccattcgtaggcagtggaacccaccggcacaaagcgcgcggcgatggttttcaggccaaccagcaccagcggcagcaggatcagcgccaggctgaagccgaaggagggcatcttgccttcgccgagatgcggttccgtgacgtcgtcaggaatatgcaattcgacgtagcggctgatgaagttgccccatagcggaccggcgataatcatccccggaatggccgcgcacaggccaatcaggatcatccagccaaagtcggcgtgcatttgcgacgccagcagcatcggcgccggtccaggcaacagaaacgccgcggcggcggcaacgccggcaaacagcgggatcaccagcttcacgaggttagtaccggtatggcgcgccatcgagaaggcgacgctaatcagcagtacgatcgccacttcgaagaacagcggcagcgcgcagatgagaccggcgagaccaatcgcatagtgcgcgcgattgtggccaaaggatttgagcatcttgacggcaatctgatcgaccgcccccgtttcatgcaggatcttaccgaacatcgcgccgagcgcgacgacgatcgccaggaagcccagcgtaccgcccatccctttctccatcgtcgccgcgattttatccagcggcatgccggagaagagaccggcgccaatagaaaccaccatcaaagccacgaaggcgtgcattcgcgccttcatgactaaaaacagcagcagcaataccgagccgactgctgttaaaacaagcgttaaagtactcactagtgactgcctttgttgatcacctcgatggtgctggccaccacgccttccagcggctggtcgatatcgacgataagcacatcgctctcgtcggcgcctggttcctgcagcgtttcaaactgcgtcaccaacatttgggttttaaagaagtgccctttacgcgccttcagacggctttcgatcacgtcgaaatcgcctttcaggtagatgaaggagaggttcgggttgcccttgcgcagaatgtcgcgatagctcttcttcagcgccgagcagacgatcagcgacaccttgttggtacgctgcatggcgaacgcggcgtcatttagcgcctgcagccacggcgtgcggtcgtcatcgttgagcggctcgccggaggccatcttggtgatattgctgcgcggatggagaaagtcgccgtcaagaaacgcggcatgcagttgatgcgccacttcgctggcgacagcggattttccgctgccggaaacgcccatcaggacatagacgtggtgatcatggttagtcgtgctcaaagcgtcctcccactggactggtacgccgcgccggggctgactcatccagcgcgaaggcggcgtatcggttaattgttacgggtaactgttatcggtaacattgtcatgccgggcctgtggagaagcaatatccattcgtgccagatgtgaatatgtgtgatctacttcaaacttgtcagtttaaattgatccgcccggtgacaatgtgaaacctaaatctaacatcttaggggtaatcgcttcaccacgaatgcgcgccagcagccgttcggcgccgatgcgccccattcgctcgcgcggggtcaggacgctggccagccgcggctccatcacctggccgatatcatggccgtggaacccggcgatcgccatatcatcggggatcttcagccccagacgctggcactcgaacgccgcgccgaccgcgaggtcatcgttggtgcagaagatgccgtcgagctgcggatattcgcggcgcgcctggcgcatcagctcaatccccgaagaataggacgaggattgttccaccatcacgctgtagggcgtcatcccggcgtcaagcatcgcctgctcgtaccccttctgtttgatgatagtacgttcatcaagacgcgcccccagataggcgacatggcggtggccgcgggcgatgatcgccgcggtcatctgccgggcggcttcaaagttatcaaacccgacggcaatatcgagacacggcgaccggctgtccatcagctccaccaccggaatgccggcgacttcgatcatcttcagggtgcgcggcgtatgggtgcgttcggtgaggatcaggccatcaatgttccaggagagcatcgattcgaggcgtttctcttccatttccggcttatagccgtagtgcgccagcatggtttgatagccgaaggcgtcggtgacgctttcgataccgcgcagtacttccgaaaagacctgattggttaacgacggcagcagcacgccgatggcgcggctggtggcgttggaaagaatgtcaggggcgcgattgggaatataacccagttcatcgagggcaacggcaatcttgccacgcagcgcttcggagacctgctccgggttgcgtaaatagcgactgaccgtcattttggtcacgccgacaagatcggctacatcctgaagtacgggtcttttctttttcatcgtcctgactgtgatcaacgggaaacattttctcagtttatcacggacaaagcgcaaccttccctaacatgagggaaggctgcgcaatttatttaacctggctcagataactatcaaaccggcggcagatcgaacagcaggatctcgctatcgctgtcggcatgaaccgaaatcgcctgctcgtcccagatggccaaaccgtcgctggtggtggctttggtaccgttgatggtcacttcgcctttgaccacctggatccacacgcggcgttccgcggcaatctggtgaaccgactgctcatctttcagcagcgcccagcgatagagttccatatcctggtacaccttcagcgagccatctcgcgcatccggcgacagcaccagctgtttgccctgggcggcgtcgaagcggcgctgctcgtagcgcggggtaatgccggtttcttccggaataatccagatctgatacagacgcagacgatcggttttgctcgggttgtactcagagtggcgcaccccggtacccgcgctcatgatctggaactcgcccgccggcacctgctctttgttgcccatgctgtcctggtgctccaccgccccttccagcacataggtcaggatctccatgtctttgtgcgggtgggtaccgaagccctgaccggcgtcgatgacgtcgtcgttaatcacccgcagggcggagaagcccataaagttcgggtcataatagttggcgaaagagaaagtatgccaggaatccagccagccatggttagcgtggccacgttcgttcgctttgcgtaaatagatcatgttgcacccccgtatgttgtcgatggagtcagtgtggacccatttcgccggcgatcatagagggtgaaaattgactcctctgttcaaaaaatatgaacaagcgcagaggagccaatttgacttatcgggtaagggtaatggtggccggtgaaggctgctcaaagccgcgctgcaggatctccatattggtgagaacgtcagtttccttgacgtaattcggctggccgttgacgagggtgtcgtacagcgcgtcgtacacccggccataatcgccgctctccagcggcaccgcttcgcgcaccatctcccctgcctcgttgacatacaccagctcgccaacgctgtcgtccgcgccaaatcccggctcgcccggcatgatattggccttcaggctggtctcctgctggtcaatgccgtacttcacaaacgaacctttgtgcccgtgaacgataaatttcgggtaatcgatctgcaccagatggctggtcttaacgatggccttcatatcgccgtagaacagctgggcttcaaaggtgtcatccgggttggctttattgcgcagcgagcgcagatcgtaagagacatggtccgggcggccgaacagcgaaatgatctgatccagggtatgcacgccaaggccatagaactcgccgttttgcggaccgccggggttggtctccgccagtgggcggtagttatcaaaatgactttcgatctccaccagttcgccgagtttcccgctctcaatcacctttttggtggtcaggaagcaggagtcgaaacggcggttctgatagggcgtcaccgtcagacctttgctgttcgccagggcaaacagagtttttgcttcctccagcgtcggggtgaacggcttttccaccagcacgtttttccccgcctccagcgcctttttcgcatattcaaaatggctgtcggcgtgagtgcagaccaccaccagcttgaccagtggatcgtttaatacttcatcaaggtcgctggtgaaatgaatatgggaatactgcggcgcctgctcctcgggcttcgcccggcggcggtaaatgtgcgctacctgccagcggtctttgcggtgcaaaacgtaaggaaggtgatagcgggtggtgcttttaccaaagccaataaatgcgcagtgcagagtcataacgctgtccttagttaatgagctaccttcaaccatagcgcaagccggtccctcacttcatcctctctgttcgcttgcagtgaagattcgttaggaaaatagttcgagtatcactcatacgtaattattaataacttattgattaataagtgattaaatcagcagttttcggcaaaaaaccttgatcgccatggcaaaactgcggataagtggagagcaaaccaggaggttgctgatgactaacggagtagccagccgctgctgatggacaaacagtatctcgccataaacggcgccctttttttctggcttctcgcgctgatcgcctggtctgtcgatgcaagcgcgctggcgcgcctggcggccgcctgcgcgcttatcgctttcctcctccatagccaacggaacaagattaacgcgatgtttattaagaaaaataaaacggaacctcagatatcagaagcagccacgcctccggcaattaacccagaacccgaagcggtcgccagcaaaaaacacgagactacggtcatcgccagcggggtgcatttcgtcggcaatatagtcgccagcggccatgtctatatccacggtcaggtcaccggcaacattgaggccaaagagcatttgattaaggtaatgcgtgaaggccaggtggagggcaacgtcagctgccgggagctaataattgacggcaaggtgcagggccagtgtcatggcgacagcatcaccatcgaggagcacggccatctggagggtactctcgcctatcgcgcgctggcgatcaagaaaggcggcgtttttagcggtcgcgctgaaatgctggccgccgcggagaacaaaagtcatattctcggtctggtagtagacgcaccctccaaaaccgacgcggagcccgtcaggccgcagagcgcctgagatagcagcaaaaaaaaagccagcacccggctggctaaagtaatactggaagcaatgtgagcaatgtcgtgctttcaggctttccgcaagggtctccctgaatgcaggacaataataatcattctcattcgcacttgtctacttttttttgcaaaaaacaacattgactccccggccgccgtcagagattgtgaaggggaatcagtaaccaaaaagaggataagggaatgagtgacatagtgatacgccatgccgaaccgcgcgatgctgaacctttacgtatgctgatggcgcacccggaggtctatcatgacacgctacagatcccctatccatcgatggaagcctggcaggagaagctacagcccagaccccatacctttcatctggtggcgacactggacgagcaggtcgccggacatctgtctctccatgttgagccgcgccctcggcgcagccacgtcgcaacctttggcatggcggttgccgccggccatcagggttgcggcatcggcagcgcgctgatgcgcgagatgatcgacctgtgcgacaactggctgcgcgtcgagcgtattgagctgacggtgttcgccgataatgccccggcgattgcggtgtataagaagtacggctttgagatcgaaggcaccggcaggcgttacgcgctgcgcaacggtgagtatgtggatgcgtattatatggcgagaatgaagtagcgtgttgccgggtggcggcttcgccttacccggcctgcgttcgcacagttgtaggcccggtaagcgcaacagcgccaccgggcaacacatcaataccccgccgttaaatcatccggcgaacgcggatcggaggcgccatacagcatgccgtccggccccaccatgatgctctgggtactgcccatcgcctctttcagcgccactttctgccccttcgcctccagcagcttcagggtatccgggctaaagcctttctccacccgcagctcatccggcagccattgatggtggaaacgcggcgcgttggtggcttccgcgacgttcatcccgaaatcgatggtattgaccaccatctgcagcacggtggtgatgatccgactgccgcccgggctgccggttaccagccaggttttgccgtctttcaccacaatggtcggcgacatcgacgacagcgggcgttttttcggctccaccgcattggcgtcgccgcccaccagaccatagacgttaggcacgccgggcttcgccgagaaatcatccatctggttattgagcagaatgccggaatcaccggccacaatgccggtaccgaaggtggtattcagcgtataggtcaccgccaccgcattgccgtctttatcgactaccgagaagtgggtggtctggttgctttcatagggcgccagcttgcccggacggatctggctggaaggcttcgccttgttgacatcaatctcggcggcgatcgctttggcgtaagccttgctggtcagcgcctgccacggcacgttgacgaagtcagggtcgccgaggtattcagagcggtcggcgtaggcgtgtttctccgcctccgccatcacctgcatagcgtcggcgctgccaaagccatatttctgcatatcgaagttttcgaggatattgaggatctgcacgatatggatcccgccggaggacggcggcggcatagagtaaacctcatacccgcgatactcgccgctaaccggcgtacgctccacagccttatagccggcgagatcggctttggtgattagcccgccgtgctttttcatctcgtcagcgatctggtcggcgatggcccctttatagaaggcgtccgggccgtgctcggcaatcagctccaggctcttaccgaggttcttctgcaccagccgatcgcccttcttcagcggctcgccgttcttccagaagatcgctttactattttcatgctgcgggatcacttcgctgccgtaggtcttcagatcgtccgccagcgcatcgttaacgataaacccctcttccgccagcttaatcgccggacggatcactttgttcaacggcatggtgccatacttttccagcgcgagggagaaaccggcgacgctgcctggcgtgccggaggccagatgcgaagtcagtgattttttactgtccgggttgccctggtcgtcaaggaacatgtcgcgggtggcctgctctggcgccatttcgcggaaatcgatcgccgtggtcttgccgtctttagtccgcagcatcataaaaccgccgccgccaatattcccggcctgcggatgggtgaccgccagcgcgtagcctaccgctaccgccgcatcgacagcgttaccgccctggcgcaggatatccacgccgacgcgggtcgccagcgcgtccaccgaggccaccatcccctgccgggcgcgtaccgggtggaacacatcttcctcgacgccataagagaccggcggcggcggtggcggattggcggcgacggtaaagctgccccccgccagcaacgcagcgatgaccacctgacgccatattgttgtttttatcattgtcttactcctgaaaggtaggtttcattccccgcttaagcctggttgataactcctaaaaaatcattgttatggcagattcgaggtacacttaagtgatcccacgcacgggaggagaaaaccatgaaagcgattctgtttctggcggcgctgatgccgcttggcgtattagcccagccgatcaatattaataacaaccctaaccagccgggttacgtggtccccagccagcagcgcatgcaaaatgagatgaaggtgcagcaacagcagcagcaaagcatgctgaagcaggatctgaacaatcagacccgctcgcagcagcagcatttgcaaaaccagctgcagactaatcagcagcgtgcggcccagggcggcaatctgaatgcgccgcagcaggtgcggccaaataacaacggtggaatgctgcggcagactaatccgtaaaggtcgtccgccgcaaatccgtcttaaggctggaaattcggcccgatgacatcaatggcatcggtgcagatgcagtctacgccccagcacagcagttcggcggcgcgctggggtttattgaccgtgtacaccagaatgtgcaggccggcctgtttcaggctcgccacccgcgccgcatccagcagtttgtgattgaggtgaatcgacacgcagcccaaccgggtggtcaattcgcgccagtcatcgcgccactcatccagcagcagcccgcgcggcagctcgggcgcggcttcctgcgccgcctccagggcgtcgatttcaaaagaggagagcagcggcgcggtcatgccttgccatagatcgcgcgcggccagcgccaccactttcccggtctgcggccccagcccggtggtcggcttaatttcgatattcgccatcatgccgtgacgacggcagcgctccgccacctgggagagcagcggcagcggctcgcccttaaattcacggctgaaccagctaccggcatcgaccttcagcagatcgtcccacgccagctcgcccgccacgccccagccattgctggtgcgttcgagattatcgtcatgcagcagaaagatctgcccgtccttcgacagcttggcgtcaaattcaatcatcgtgtgcccgtagcgggcgccgacgtcgatagccgccagggtgttctccggcgccagtttaccgccgccgcgatgggcgacgatgcggggataaggccagttactcatgcgcgttgtcctgtttcaccatcaaagaggtgcagatgttccaaaggcagatgcagccatagcgtgctgcctgccgccgggcgctgctggtgcggcagtctgaccaccagcttctgttcgccccagcgcccgtgagcgaggttatcggcacctaaaatttccagggtgtccatcagcagcggaataccaccttgcgcctgcgagcttaagataaaatgctccggacggataccgagcgtcattttacgcccagcgtggcgccggtgctcatgattcgtcggcagctgcatgccgcccgccagctcaaagcgaccgccgtcatcgctgatgcgcccttccagcaggttcatggccgggctgccgataaagctcgccacaaagcggctggctggcttctcatacacttccaccggggtgccgatctgctcggcaacgcctttgttcatcaccatcacccgctgggcgagggtcatcgcctccacctggtcatgggtgacgtacagcgaggtggttttcaggcggcgatgcagctgctgcaattccagacgcatctgcacgcgcagcttggcgtcgagatttgacaacggttcgtcgaagaggaataccgccgggtcacgcacgatggcgcggcccatcgccacgcgctggcgctggccgccggacagttcccgcgggcggcgcttgagcagaccatccagctcaagaatgcgcgccgcctcctgcacccgctcggcgatcaatcccttacccatgccgcgaatcttcagcccccacgccatgttctcttccacgctcatatgcggataaagggcatagttctggaacaccatcgcgatgccgcgatccttcggctccatctcggtcacccgtttacgatcgatccagatatcgccgctggtcacccgttcaagtccggcgaccatccgcagcagcgttgatttcccgcagcccgacgggccgaccatgacgataaattctccgtccgccacgtccagcgtcagcggttgaattacctgggttttgccatcccagcttttgcttactgcctgtagttttaaaccagccattttatttctcactatcgaccaggccgcgcacaaacgcgcgctgcatggctaaaacgatgacgaccggcgggatcagggtcagcagcatcgccgccatcacctgattccactgggtagtaccttcgccggtggcgatcatgcctttaataccggcgacggcggtgccaagattcacatcctgaataatcagcaacggccacagatactggttccagccgtagataaaggtgatgacgaacagcgcggcgaggttggttttcgacagcggcagcacgatgtcgcgaaagaagcgcatcggcgaagcgccatcgatacgcgccgcttcaatcagctcgtccggcagggtcataaagaactggcggaacaggaaggtggcggtggccgaagccatcaacggcagcgttaacccggcatagctgtcgagcatgttgaggttggcgatcacctccaccgtcgggaaaatacgcacctcgaccggcagcatcagggtgataaagatcatccagaagaacaggttacgcagcggaaagcggaaccagacgatagcgaacgccgaaagcatcgacaccacgattttgccgaccgtaatggcgaacgccatgatgaaactgttgagcatcatcagccagaacggcgcgctgttgacgccgacgccgttcacccagatggtcttcatgttctccagcagatgtccgccggggatcagcgtcatcggcgtttcaaataccgatttgttatccagcgtcgccgccacgaaggcgacgtacagcgggaataaaatgacggcgatacccaggatcagcatggtgtggctgaaaatcgtcagcccgcgtcggttctcaatcattggtaacgcaccttactttcaacgtaacggaactgcaccaccgtcaggataatgacgaggaacatcagcaccaccgactgcgcggcggaagcggatagatcgagcccggcgaaaccttcgcgatagattttgtagatcagagtggtggtcgcctgcaccgggccgccggcggtggcggcatcgatcaccgggaaggtgtcgaagaaggcataaaccagattgaccaccagcaggaagaaactcaccggcgcaatcagcggcagcgccagcttaaagaagcgacgaatcggcccggcgccgtcgatggcggcggcctcaaccagcgaacgcggaatcgactgcagcgcggcgaagaagaacaggaagttgtagcttatctgcttccacaccgaggcgaagaccaccagaaacatcgcctggccgctgttctgcgcatggttccagtcgtagcccagctcgccgaggaaatgggtgatcagcccgcgcccggggttaaagaggaagatccacagcaccgccgcgacggcgggggccacggcgtacggcagcagcatcagcgtttgataaaagcggctgccgcgcaccacatagtcgaccagcgcggcgaaaaacagtgaaatgagcaggccgctgacggtcaccagagcgctgaattttatggtggtccagaacgagtccaggtagtacggatcgtggaacagcgcaacgaagttatccaggccgacgaactggctggaaaggccaaagggatcgacgctctgcagcgagtaccacagcgcttcgcctgcgggccagataaagaaaatcagcgtgataatcagctgcggcgcgaccagcacatagggcagccagcgcgagcggaataccggacgggatgatgacattgagattgggttcctgaacaatgccgggtggcggctacgccttacccggcctacatagggcacatcgtaggcccggtaagcgcagcgccaccgggcaagttacagattacgatttggtcgcttgctcgaagcgacgcagcagctggttcccgcgctgcacggcggaatccagcgcctgctgcggggttttcttgccggtccacacgctctccagctcttcatcgacgatggtgcggatttgcggcatgttgcccaggcgcagacctttggtgaacggcaacggcggcttgttcagcatctggcgggtagcgatatcggcgcccgggttcttatcatagaagccctgctgacgcgtcagatcgtaggccgcggtagtgatcggcaggtagccggttttctggtgccactcggcggcgttttccggtttggtcaggaagtcgaggaacttcgccacgccggtgtaggtctctttgtctttgccctgcatcacccacaggctggccccgccgatgatggcgttctgcggcgcgcctttcacatcggcatcgtaaggcatcatgccgacgccgtagttaaatttggcgtactggcggatatcggccagcgagccggacgaggcagtggtaatggcgcagtcgccgttatagaacttttctgtagactcgtctttacgcccgaagtagctgaaatcgcccttcttgttcatctcttcgagcagcgcgatatgcttcacctgctccggcttgttgaactcaagaaccgcgtcggtaccgtcgaagccgttattcttcgtggccaccggcagaccgtgccaggcgctgaagttttcaatctggatccagccctgccagccgctggcgtagccgcacttcatcccggcggctttcagcttcgcggtataggccgccagatcctgccaggtcttcggcggctgctccggatctaagccggcttttttgaaggcgtctttgttgtagtagagcaccggggtagagctgttaaacggctgggagagcagatggccggttttcgaatcggtgtaatacccggccaccgtcggtacgaactgcgattcatcaaacttgatgcccgcctcgctaaacacctggtagaccggcttaatggcttttgacgccatcatggtggcggtgccgacttcatacacctgaaggatagccggcgcgttgccggtacggaaggcggcgataccggcgctcaggctctgctcgtagttgcctttgtataccggaacgattttgtaatcaggattggccgcgttaaagcgttgcgccagagaatccacttctttacccagctcgccttccattgagtgccagaacgggatggtggtaaccgccagggcctgaccggcaaaagccaggctcagcgccagtcctaaagctgtatgtcgtaacgatatcatcggttatctctcttgttgtgccggatgcgcgatttcacgcgttttatgctcgcggggtaacatgacatgttcgaattacagaaaaataacttttttattacaaaaaaaagatagtaacgggtcagagagatgacaagccgatgaaaggacgggggaagtaaagtgggagctgagacacggataatattcgtgcggtcggctcccggggtcggcgcaagcgcctcgcccgggctacaaaccggcgaagccgccgggttgcaacgagttaaccgtcatccacgcaaacgcgcgacaatctgttccagggtaagttgccctgctgctgcctcgacggtcatgccgacgaagtctggattcgctggcaatataattccatttcgctttaaaaaaagcagggtgataaacagtgccgtacgcttattaccatcattaaatatatgaccgcgagaaatcgccagcagatgcatcgcagcgagtcgccacacgtctgtcacaccttcatattcaattttgtttagcaccctatacattatcgcttcggcacgccccggatcgggcataccggcaacgccaggcgtgacgcggagcagcctgtcgtgaaactgtattatctcttccgctgagataatctgcagcgtcatttatccgcaagctccctgatctcatcaccatgaaccgccatgatagccgcgaactcatcatccattctggccgcctggtagcgttcaaactcttctgcactaatgatgactgcagatttatgcccacgacgggtaatggtcacaggtacacctgtcactgcgctttccagcacatcggccagattttgccgggcttcgctatagttaaccgttctcataaaaacctccaaagctgtactcttttattgtacaacatacatgtacaaaaaaagagccaacaggctcttttaaatgtattcgtgcgatcggctcccggggtcggcgcaagcgcctcgcccggactacaaaccggcgaagtgaacgacgccgggttgcgatgaattaaccgccgagataggcgctgcgcaccgcctcgttggccaacagcgcgtcgccagtgtcctccagcaccacgtggccgttctccagcacatagccgcggtcggccagcttcagcgcctggttggcgttctgctcaaccaggaagatcgtcatcccttgctcgcgcagctgctcgatggtgtcgaaaatctgctgaatgataatcggcgccaggcccagcgacggttcatccagcagcagcaggcgcggttggctcatcagggcgcgaccgatcgccagcatctgctgctcgccgccggacatggtgccggcgcgctgaatacggcgttcatgcagacgcgggaacagctcatacacccatttgatgcgggtctggaactgatcgcggtcggcaaaaaaaccgcccatcgccaggttctcttccaccgtcatacgcgaaaagacgcgccgcccttccggaacgatcgccaccgcctcgcgcatgatcttcgcggtttgccagtcggtaatatccttaccgtcaaagacaatgcgcccgctggaggcgcgcgggtcgccgcacagcgtgccgaggagggtggttttccccgcgccgttggcgccgataagcgtgacgatctcgccctgtttgatatgcaggctgacgttgtgcagcgcctgaatcttgccgtagtgggcgctgacgttgtcaaaagttaacatcgcgttttccatcttatgcctcaccaaggtatgcgcggatcacgtccgggttattacgaatctcttccggcgtcccgttggccagcggtgttccctggttcacgacgtagatgcgatcggaaatgcccatcaccagcttcatatcgtgttcgataagcaggatggtggtgttgtgatggttacgcagctcggcgataagctcgtccagctctttggtctctttcgggtttagccccgccgccggttcatcgagcatcagaatttccggctgggtcaccatgcagcgggcaatctccagccgacgctggtcgccgtaggccaggttgctggcctgacggttggcatgctccagcaggccgatgcgctccagccaggtggcggccctgtccagcgcttcgctctgcgcccgacggaaggccggcgttttcagcaggccggagaagaacccggttttcagctgctgatgctgcgccaccagcaggttttcaatcaccgtcatttcgcggaacaggcgcacgtgctggaaggtccgcaccacgcccatccgcgcaatctgctgacccggcagcccttccaggtgctggtcgcgcagcagaatagtgccgccggtgggcttgtaaaaaccggtcaggcagttaaagacggtggtcttcccggcgccgttggggccgatcagcgagacgatctcgcgctctctgagctccagcgacacattgttgacggccagcagaccgccgaaacgcatcatcaggccgctaacggataataatggctgactcatgcctgctctcctttcgcctgaccgtttttcagcttcaactgcacgcgcgtcattggcagaagcccctgcggacgccagatcatcatcagcaccatcaggccgccgagcattaacatgctgtattcgttgaagtcacgcatcaactcgcgcgagaccaccagcagaatagccgcgaggatcaccgcgaactgcgagcccatcccgcccagcacgacgatcgccagcacaaaggctgactcggcgaaggtaaaggattccgggctgacgaagccctggcgcgcggcgaacagcgtgccggcgaagccagcaaacgcggcgctgatggtaaaggcggtcagcttgatgcgcgtcgggctcaggcccagcgaacgacaggcgatctcatcttcacgcagcgcttcccacgcccgtccgagcggcatccgcagcagacggttaataacgaacaggctgagcaccaccagcagcaacgctaccagatagaggaaaatcaccctatcgctgggatcgtacttcagaccgaagaagttgctgaaggtatcccagccgccttcacgggcggtacggctaaattcaagaccaaagaaagtcggtttcgggatctggctgataccgttcggcccgccggtgatctcggtattgttgagcagcagaatgcgcacgatctcgccgaagcctaaggtcacaatcgccagatagtcgccgcgcagacgcagcaccgggaagcccagcaggaagccggccgccgcggaaaccaggccggccagcggcaggcaggtccagaagccgagaccgtaatagtggttaagcagcgcaaaggtataggcgccgatggcgtaaaacccgccgtagcccaataccagcaggccggaaagcccaaccaccacgttcagtccgagaccaaggatgatataaatcatcgtcaaggtggcgatatccaccgtaccgcgcgacaccataaacggccaggccacggcaatcaccagcagggctatcagaaacagcttctgcttgaccgtcgacccgtcaatcgccggcataataaatttcggcccggaaacgttcttaaccgctttctggaacagcgggcgcagcagctggaagaaaaagaccaccgcggtgccgatgaaaatccactgccaacgaatatcggcggcggtatcgaccaccagtttggtgccattcagctccagctgcacgcccataaagacgcccgccagaacaaagaacatcgcggcggaaagcagcgccatcgcaatttgcatcggtttcatactttttctacctccgggcggcccagaatgccggtcggcatcactaacagcaccagaatcagcagcgcgaaggagacgacgtccttatattcggtgctgagataagcagaagagagcgcctcggcgatacccagaatcaggccgccgatcatcgcgccagggatactgccgataccgccgagcacagctgcggtaaaggccttcatcccggccataaagccgatgtaggggttaataacgccgtagaactgccccagcaggacgcccgcgaccgccgccatcgctgcgccaatgacgaaggtcagcgcaattacgcggtcggtattgatgcccagcaggctcgccattttcagatcttccgcacaggcgcggcaggcgcggcccattcgcgaatagcgaataaacagcgtcagcgccagcatggcgataaaggtcaccacccagatcaccagttgcatggtggtgattgtcgcggagaagctgtcgctgtggccgacgacccactggccgttaaacaagctcggcagcgccacgtcgcgggagccctgggtcaggctgacgtagttctgcaggaagatagacatcccgatggcggagatcagcgcaatcaggcgcttggagttacgcaccggccgataggccacgcgctcaatgctccagccgtaggcgctggcaatcacaatggcgcccacgaatccggcggcgaccagcagccagctagtgtcaatgcccatcatcatcagcgcggcgatgatcatgaaggagacatagctgccaatcatatagacctcgccgtgggcgaagttgatcatgccgataatgccgtacaccatcgtatagccgatggcgatcaacgcataggtactgcccagcgtgacgccgttaaacatctgctgcagaaaatagagaaactgctcggacataaggtaacctttttcaaaccgcccgcggttcgcaggcggagggataactcgtcttcagcgcttatttcgccgcgctcgaagagccatcggcgtgccactggaagacaccaaactcaaatcccttcagatcgcctttttcatcccaggtcagcggcccaatcacggttttcgccccgtgcgctttcaaatctttgattaaatccagcggctgctggctgccggttctgtccatcgcctgcgccagcgactgcacggcggcataggtgatccagacgtacggtccgctcggatctttcttctccgctttcagcgcgttgacgatggcgctgttggcagggtcctgatcgtagcgttttggcattgtcaccagcatgccttccgccgcggcgcccgcgatattggacagcgaggcgttgccgaccccttccggccccataaacacggttttcaacccgacggagcgcgcctggcgcagcatctggcccatttccgggtagtagccgccgtagtagacgaagtcgatgttctctttcttcaggcgcgccagcagggcggagaaatctttttcccccgcggtgatgccatcgaagaagacgatgttggccccggctttcttcaggttgtcctgcaccgaacgcgccagcccttcgccgtactgctgcttgtcatgaatgatggcgatacgctgcggtttgactttctcgacgatatatttcgccgcggtcggcccctgcgaggagtcgaggccggcggtacgcatgatgtactggtatccgcgctgggtcagctccggattggtcgccccgggggagatcatcaggatgccttcatcctcatagatgtcggaagccggctgggtggaagaggagcacaggtggccgataacgtactgaatgccgtcgttgacgattttgttggccaccgcgaccgcttgcttcggatcgcaggcgtcgtcatattcgacggccaccagcttgtcgcccttaatgccgccgctggcgttgatgtctttaatcgcctgacgagcgccattgaactccatgtcgccccactgggccactggacccgacatcgcgccgaccacggcgaccttaatatccttggccatcgccgcgtgcgacatcgctaatgcgacaatgcccgcgacgatggttttcgcgttccttttcatgctgcagaaccccgttcgtgatgtggtgtaaatgttttgtatttttatggttaaaaagcattctgtgcttttattaaacaacgccatttttaccattgagtttaatggtttagcgcagtttttcactaaaaaacagattaaaacctctatttttcagtcgattaagcaaagataatattctgtattttggtgaagataaacaaaaaaaagtccatcctgcagcataaaataacgatacataaggcggaataaaacgctgcacattaggttaaaattctgcttatttttcgatccatgacggattgcgctaccctgacaacgccaggaaaacgaatcccctgatgtacgcgcaaaaaacagcgctccgccagacagcaattttgggtacactggcgcctctgttttgcactggatttgccgcccatgaaactgaccattatccgtttacagcacttcagcgatcaggatcgcattgatctggggaaaatctggccgtcgcaggatctgtcgacgctgacccttgatgaaaaccatcgtctctacgccgcccgctttaacgagcgcctgctgggcgccgtgcgcgttaccctgcgcggcgtcgaaggtgagctcagcgatctgtgcgtgcgtgaagtgacccgccgccgcggcgtcggacaatacttagtggaagagacattgcgtgataacccggcgatcaatagctggcgcgtcgccgaccatggggtggaggaccgcggcgtgatggcggcctttatgcaggcgctcggctttagcgcccagcagaatggttgggaaaagcattaagccgtagtcccaataagcggagcatgaccaaggaagaacccggcggcgcttcgcttagccgggctacctggcgactgtagccccggtaagcgcagcgcgaccggggtcagacaacgcatttgcagtgggaaaggcgccccccatttaacccagcatttcgcgttgtaaaaaggcgtcaagacccgaaatccccgggagcttacatcagtaagtgaccggggttgagggccgcagacaacgcatttgcagcgtgaaaggcgccggttaaattatttggcgtcggtcgccgtaccgttcgcatgccaggtaaagaccccgaactcaaagcctttcaggtcgcctttctgatcccacgacagcgggcccatcacggtgtctactgtcgcgcctttcaggtatttagcgatttccgccggatcgtcagactgattcaggcctgcctgcagcgactgcagcgccgcgtaggtggtccacacgaaggcgccgctcggatcctgtttcttcgccttgatcgcatccacgatcggtttgttcgccggcacctggtcgtagttcttcggcttggttaccagcaggccttccgccgactcgccggcgatgttagacagggagacgttcgctacgccttccgggcccataaactgggttttcagaccggcggcgcgcgcctgacgcaggatctggcccatttccgggtgatagccgccgtagtagacgaaatcgatattctctttcttcaggcgcgccaccagggtggagaaatctttctcaccggcggtgatcccgtcgaagaagaccacgtttgccccaccttttttcaggccatcctgcaccgcacgggccaaaccttcgccgtactgctgtttgtcatgtaccactgcgatacgctgcggcttcactttgtcgagaatgtatttcgccgcggttggcccctgatcggagtccagaccggtggtgcgcaggatcagcttatagccgcgcgccgtcagctccggagcagtcgctgccggggtaatcatcagaatgccttcgtcttcatagatatcagacgccggctgagtggaagaggaacacaggtgaccaataacgtatttgatgccgtcgttgaccactttgttggctaccgctaccgcctgtttcgggtcgcaagcgtcatcatatttgacgatctgcagcttattgcccttgatgccgcccttagcattgatatccgctaccgcctgctctgcgccggtaaactcctggtcgccgtactgggccaccgggccggacatcgccccgactaccgcgattttgatatcttccgccagcgccgcgctgctcataactaaggcaatacatcctgccagtaacgctttacccttcatattcatcctgaggctccccattattatggtttttgcatttgttgtgatgttgtttattagcgccttattttgtttataccgataggaaaagcatatgatagctaatcaaccgggggctgcccgcgcttttgcagcacactatgctaaacataccgtcattctgaggaatttgaaacgactaaattgcgggctatgtaacagataagtgacaaataaaaaaaccgcgccagcatgaaccggacgcggtgcaaaacagagcctgattaccagcctgcgggtaggtagcccaccgcggatgctatcgcgtaggcggcgctgcaaagatacaacaacacaatgaagcattggataagcggatgggtcatccaggccggacaggtccagcccggggtcagatcgccacgctggcgggcgcccttgagcatcaggatcggcataatcgataaaatgacgccgctgaacaccccggcaaaatagagcgcgttgacgaaggagaccatgccgctataggccagtacgaacggcgggatcgccaccaccagcagcaccatcaggcgccgggcgggctgttcgtcattccccaggcggaactgatcgaagatattggtcaggaagctgccgcccagtccccagtaggaggtcagcatcgcgcacagcgcaaacagattggctgagaagaaggcccattcgccaagcgcccgcccccaggagatggtggccacatccgagatattgtccagaccgttaagcgagatcaccgacaacggcaccagcgccagcagggtaaaggtcagcgccatgccgaccatgatggctttaggcaatttttccggtttatcggcgaagccccgcgccatctccggcacgatatactgtgccgagaagcagaatgccacgacgttgaagaccggaaccatatacagccagttgccgtcgagcagatagccgacgcgggtggtctctttcaacagcgtggcaatcaccagcaccgagatcatcaccaccatgccgatgctgataaatttctcaccgcggccgatcgccttcagccccaggtagagtacccctgccgccggaacgaaaaacagcacgctgcccagcgccggcgagatgccaaacagggagtgcagcagcttaccgctgccggtcatatacgccgtcaatgccccgacgctattgacgcagacggagagaaacatcatcagcgcgccaaagccgccgacgtagcgcttcgataatccactgagctgcagatgtttacgggtgcgcagcgtggattccgcgacatagagcatggtcaccgtggtcagactacccaccagcaccagccagaacagcagtggtaaaaagcccgctttgcttgacgcataggcgatagagaggacgcccgcgccaatattggtaccgacaatcatcgataccccttcgacgaagctcagagattttgcagggacagccgtacgttcccggccggtgaggacgggagaaaaggtggagttttcagacataatactttccgttttactccggcggttgtcaccgccggaaaaaaggtgatatcagggtgataaaccactcacgctgagcataaacagccggctgcggcgtcctgtttctgttcggcttccctgccgccgcagcccgccggggagacgttagctcttcagtacgcgcgccagaatatccagcgctttcgagaactgggcgtcggggatagtcaacggatacaggaagcggatcacgttgccgtagacgccacagctcagcagcagcaggccgttctcctgcgctttctgttgcacctggcgggtgaattccggcgacggttcgcctgtttgcggatcgttaaactccaccgccaccatcgacccccggccgcggacatcaacgatcgccgggcaggtagcgcgcgcctggttgagcacttcctgcagatggctacccagctgttcagcgcgctgacacagctgctcttcggcaatcacatccagcaccgcgtgcgccgcggccaccgccagcgggttaccggcataggttccgcccagcccgcctggggctggcgcatccatcacctcggcgcgaccgacaacgcccgacagcgggaaaccgccggcgaggcttttcgccatcgtcatcagatccggtttcacctcatagtgctgcatagcgaacagcttgccggtgcgggcgaaaccggtctgcacttcatcggcgatcagcagaatgccgtgggtatcgcacaggtcgcgcagcgcctgcataaaatcggccggcgcgacgttaaagccgccttccccctggatcggctcgagaatgatggccgctacctggtccggcgcaatatccgctttgaaaatgcgctccaggcttttcagcgcatccgcggtggtcacgccatgcgccgcattcgggtagacaccgtgatacaccgagcccgggaatggcccgaagccgattttgtagggtgcgaccttaccggtgagggccatggtcataaaggtacggccgtggaaaccgccgccgaaggtaatcagccccggacgaccggtgtaagcgcgggcgattttcaccgcgttctcgaccgcttccgcgccggtggtgaagaaagccgtttttgccggcccgtcaattggcgccagatcgttgatacgctccgccagcgaaacatagctttcgtacggcacaatctgataggcggtgtgggtgaacgcctgcagctgctcggctaccgcggcgaccactttcggatggcggtgaccggtatttaacacggcgatcccggcggcgaaatcgatcacctcattgccttcgatatcccacagcgtggcgttttccgccttctcgacaaagtagttacacattacgcctacgccgcgcggcgtcgcctgctggcgacgttgattcagttctgagcttttcacctgcgaatctcctgtcgtgtatgtcacgttatcgcaacaaattagaaacgatgtcgtttatttacacaggagttggccctataatcgagtaccaattttgaatatctgagggatccaattgcgttcgctggtgggtgacctggtgctggtccgtctgcaggaagagcgggatcctcttctgcacaaacgcttatataacgcgctgcgccgcgcgatcctcgacggttcgctggcgccgcaaagccgtctgccgccgtcgcgggacctggcgggcgaacttggcgtatcaagaaacaccatattaacaacttatgaacaattgctggcggaaggatatgtggtttcccgtcggggaagcggaacattcgttgcccaaaccgcccctgagagctcattgacggctaaaggtcagcaagaaaacagcagtatcgcagcaccgacggcgcatctttcacgccgaggccaacatctgctcggccaggtcagcgccagcccgcgccagtggggagcgtttatacccggcgtgccggacgttaacgcctttccccacccgctgttcagtaagatccaggcccgcatcagccgtcggcccaaaccggagcggcttagctatagctgcaacggtggcaccccggaactgcagcaggcgctggtggattatctgcgcgtgtcgcgcggcgtccactgtcagtcagatcaaattcttatcaccgaggggatccaccaggcgatcgatctggtcacccgcatgctgtgtgataacggcgatctggcgtgggtggaggagccttcctactgggggatccgccacgtgctggcgatgaacgacgttcgggcagagcccctgaccgtggatgccaacggcctgtgcccgccggagacggttgacgatgcgccgaggctgatcttcgttacgccttcccaccagtatccgctgggcgcggtgatgagccttgagcgccgccagcgcctgctggcgctcgcccgtcagcaggggagctggatcgtcgaagatgattatgacagcgagtttcgcttttccggtcagccgatccccgccctgcagggtctggtcgccgacgccccggtggtctatatcggcaccttcagcaagacgctctatcccggcctgcgcctgggctacgtggtgatcccgcggccgctggtcagcgacctgaagcacgcccatgccgagctttaccgcggcggccattcgctgatccagatggcgctggcggagtttattaccgccggccactattcggcccatatccgccgtatgcggctgctatacagccgtcgccgcgcctttttaactgagcttatccagcggcactgtatgccgtacgccctgtctgacttcagcgataatgccgggctgcatttgatcctcaatttgcccgcagaggctgacgatgtggcgatcgccagagaggccaatgcgcggcacattctggtgcggccgctgtcgcgctactacctgacggcggcgcgcaagaaaggattactgatgggattcgccagccagcccgaagagcagatggcgtcggcgttcagcgtcttactcggctgcctgcagacgcactgcccgcagatgctcctgctccgggaggacgcagaaaaacaaaacgccccaacctgaggcggggcgttatcggggagcctgatatcaggtatcaggcaggcgtggcgtatcaggcttcgatagcggcacgcagttttttcatggcgttcttttccagctgacgcacgcgctctgcggagacgccgtagcggtcggccagttcctgcagcgtggacttgttatcttcgtccagccagcgggcgcggatgatgtcctggctacgctcgtccaggccctgcatcgcgtcagtcagcttattcgccgcctgctcttcccagttatcgtcttcgatgccgtcggcaaagttagacgttttgtcctgcagatacaggaccggcgccatcggctggctgtcggactcatcgtcggacgacatgtcgaaggtcatgtcctgggccgccatacgggattccatctcgcggacgtctttgctcgacacgcccagctcacgggccaccatttccacttcatcctggttgaaccaacccaaacgctgtttggttttacgcaggttaaagaacagcttacgctgtgctttggtggtagcgaccttcacaatacgccagttgcgcagcacgtattcgtgaatttcggctttaatccagtgcacggcgaaggagaccaggcgcacacccacttccgggttgaagcgacgcacggctttcatcaggccgatattgccttcctggatcagatccgcctgcggcaggccatagcccgagtagttacgagcaatgtgaacaacaaagcgcaggtgagacagaatcagctttttcgctgcttccagatcgccctggtaatgcagcttttcagcaagctcccgctcttcatcagccgacagcatcggccaagtgttagcggcccggatgtacgattccaggttaccaacgggggctaaagctaaagtttgcatttctttggtcattcaaatcctctcaattgatatcttctgacgcgttcttgtccccatcaggcaacaagcatgccagcattcatgagcaacgagaatatcactcacattagtatcagacagtgattttatccacaagttccatgcaacggtgtgaataaattacgcacaaaatgtgacaccacgatgaaaaagtgagggcaggaaaaggggaacaagcttgcggtatctttccctgcgaacaggaactcattgcagcagggaaagattatatcacgcttttattaatcgggagtaaagtgacgtaaatgttgcactgtcgccagccaggcggctacccacccgatcatcgagcagacgatcaacatcaacagacactcgtcgaagcctaagccgctcagctcaaactgagtgccgaagactttcgccacttcggtcaccgccgacgagaggcgcattaccagaatctccgacaggatcagcgataaaaacgcgccggaaaagcccagcatcgctccgccgtagaggaacggacgcaggataaagccgtcggtggcgccgataagcttctgaacgttaatggtatcgcggcgggcgaagatgctcaggcgcacgctgttgccgatcaccaggaacaccgccgccaccatcagcacgccgatcatcgccgacacgcgtcctaccagcccggtgagcgaggagagacgggcaaaccaactgtcgtccatccgcacttcatcgacgccctggatccgcgatacccgatcgcgcagggtattcagcgcctcggtgctctggaaatccagcttcggcaccacgatggcgaccgccggcagcgggttctcctccagcatatccagggcgccgccaaagccagaccagttacggaattcccccagcgcctcgtcacgggacaaatagtttaccttgtcgacgccctgctccgcctgcagctggcccaccacccgcgccgcggcatcgtcatccagcgttttttccagataaacggtgatctgcggcgagggataatactgggacgccgcgctgctgacgtttttgtagaccatgtagcagacgcttggcagggtcaacgaaatggcgatgaccattaccgtcaggaaggtcgccagcggcgtgctttttagatcctgcagcgcgccgtgccaggcatagcgcacctgctcgttgaatacgttgctcttacgcgaggccgggttaggcgccgctttcggccgttttggcgcattgcgcccgccaccgccgccgcccgcggcgttgcgcaggcgatcgaacttgctgccgaactggcgaatctggttcattgcgtcgcgcttattcaccccgaatgcctccatgcagatggccgtcgctaagcgtcagcacgcggtacggacgactggagataagccccagatcgtgcgtggccatcagtaccgtcaccccgacgcggttaaactcttcaaacagacgtaaaatcccctccgagagcgcctcgtcgaggttgccggtcggttcatccgccagcagcaccgccggcttgttgaccaccgcgcgagcgattcccacgcgctgctgctcaccgccggagagctgaatgggaaaattcttcgctttgtccagcaggccaaccttgtccagcgccgccgagacgcgacgacgaatatcatcgccgctggcgccggcgataatcagcgggatcgccacgttgtcatacacggtacgatccatcagcaaatggtggtcctggaaaatcataccgatctggcggcgcaggaacggcacctcacggctcttcagacggctgatttcatgaccgctgaagaagattttcccggcgctgggccgttcgataccacagataagcttcagcagggtactcttccctgcgccggaatggccggtcagaaacgccatctcgcccggctgcaggtggaaggtcaccccctgcagcgcttgtctcccaccgagataggctttgctgacttgttcaaagcgaatcattcttaatcctctcgggcaaaaagtgcctcaataaagtcgcccgcattaaacggacgcagatcctcaatacgctcgccgacgccaatatagcgaatcggaatgccgaactgatcggccaccgagaagatcacgccgcctttggcggtaccgtccagcttggtcagggtgatcccggtcaaacctaccgcctcatggaacagtttggcctggctaatagcattctgcccggtgctggcgtcaatggttaacatcacctcgtgcggcgcgtcgacgtccagctttttcattacccggacaatcttcttcagctcttccatcaggtgcgatttattctgcaaacgcccggcggtatcggcaatcagtacgtcaacatggcgcgccttcgccgcctgaatggcgtcgaaaatcaccgaggcggagtcggcgccggtgtgctgggcgatcaccgggatattattacgctggccccagacctgcagctgttccaccgccgccgcacggaaggtatcccccgccgccagcatcaccgacttaccctgctgttcaaactgacgcgccagcttgccgatggtagtggttttccccaccccgttcacgccgaccatcagaataacaaatggcgttttgccttcaacgttcagcggctcgtctactttggcgagaatctcgcccatctcttctttcagcaggccgtacagcgcttccgcatcgcgcagctgcttacggctggcgccttccgtcaggttggtaatgatcttgcgggtggtttccaccccgacgtcggcgatcagcagctgttcttccagctcttcaaacagatcatcgtcgatcttcttaccgcggaacaggctgataaatccggaaccgagattttgcttcgttttcagcaggctacgtttgaggcgggcgaagaaaccttcttttgtcggtttttcctgctcctgagccagcgcttcaagcggcgcctcgtcctcgggcgccggcaccactaccgccgcctcttctgccgcttcggccgccagcgcctgcgcttccagctcttcatcgcttaacggcgcgtcctcttcgggcgcttctgtctcctgcggctggacaacgatgccttccacaggctgctctgctacggcttccgccaccaccggttcggcgataacctcttccgccagcggctcaaccaccgcaggctgttcaggcggttcgctgaccgcgggctccggttcaacaacaggcgtttcttcggtcagaacaggcgtttccacccactcttcttcctgcgcgctggcaggctccgcgaggtgcgctttttcgctttcgaccaccgtctcggtcacttcgacgacgtcttcggcaaacgcctccgggtctgctttcggcgcgctcggctcagcaggggtttcaaccgccggtatctcttcggcaaccgcttgctgttcttctactttttgctcagtctcggtttcctgtgcctgttctttctgtccaaagcccagccaggaaaagaagccacgttttttctcttttgccatttgcgaccacactcctcgctgtttattcatggcgcagcttcatcagaagctgaaaaaatgatgaaattagttggatagtctatcacttaacttaactcgcagcaccgcccccggattaaggtttcgtcaaccgccgtcgatcgctagaatagcaggctggaagttgagacttgagcagagagatgaaaaaaccaaaccacgcgggcagcggccagatccgcatcatcggcgggcaatggcgcggccgtaaattaccggtgccggagagcccgggcctgcggccgaccaccgaccgggttcgcgaaaccctttttaactggctggcgccgtccattgttgacgcgcactgcctcgattgctttgccggcagcggcgcgctggggctggaagcgctgtcccgctatgcggccagcaccacgctgctggagatggagcgcggcgtagcccagcagctgcaaaaaaatctcgccaccctgaaagcggatcgcggcaaggtgatcaccaccaacaccctcagcttcctgagccagccggggaccccgcaccagatcgtgttcgtcgacccgccgttccgtcaggggctgctggaggagacgctacgtctgctggagacacaaggctggctggccgatgaggccctggtgtacgtcgaaagcgaagtcgaaaacggcttaccgccggtgccggctaactggcaattgtatcgtgaaaaagtggccggacaggtcgcctaccgtctttaccaacgtgaggcccaaggagagcaccatgctgattaatttaggccgcctgctgatgctgtgcgtctgggcctttctgttattgaatctgtttcagcccttcccgaagccgctgaatatctttgtcaacgtcgcgctgattttcatgatcctgatgcacggtctgcagctgacgctgctcaaggcgacgcagccgaaagaggcgccgccgctgagccgctttgagcaaatccgcatttttattttcggcgtgtttgagctcgtcgcctggcagaaaaaactgaaggcgacgctgaaaaaatagtcctgaaaagggctcagggatcgggcgtaaacgccacgaacgctgtgcccttataactcaacatcccacgatcgccgacgctcagcgcgtgatattgcggcgcgtcaaggcgaaacaccacctccagaccaccgttttcggggcgaaagctcgcttcatagcgcatctcactgcctgcaggcgtcaccgtctgctgccgcgagcgccgatcgttaatcactttttcccgtttattgctgacgataacccgcttttgtagcaacggcgcggcgtcattcgcctgtttctcacggcgctgctggacatagcgaaacgaagccgccaccacaatcaccgcgacgaccagaacaaaaaagaggggcattttactcattagggttacccataaaaaatatcaggaatcagcatactgcgtcgggaataacattgtcatctgctacgccaaaccactacactgagtagtagcatcacgcatccgtaactttctttatgataacagatacagggacttactatgctttggtcatttattgctgtctgtttctccgcatggctttatgtcgatgcatcctatcgtgggccggcatggcgacgctgggtttttaaacctgtcaccctgattctgttgctgttactggcctggcaggcgccgatgttcaatgccatcagctatctggtgctggctggcctgtgcgcctcgctgctcggcgacgccctgaccctgctgccgcgccagcgggtgatgtacgcggtgggcgctttcttcctgtcacatctgctgtataccatctggttcgccagccagctgacgctgtcgttcttctggccgctgccgctggtgctgctggtattcggcgccctgctaatggcggtgatctggagtcggctggaagagatgaaaatgccggtgctgacctttatcggaatgacgctggtaatggtctggctggccggtgagctgtggtttgcccgccccaccaacaccgcgctgtccggtttcgccggcgcagccctgctgctgctgagcaatgccgtgtggctggtgagccactatcgtcgccgcttccgcgccgataacgccatcgccgccgcgttctactttgccggtcactttctgatcgtgcgcgcgctgtacctgtaatttagtccttgactctggagtcgactccagagtgtatcctacggctaatgagaaaattatcatttcccggagggtgccatgtcgactccagacgcgcaggataaaaaagttccacaattctcgtctttcaccatgcggccagcaaccgccccggcggagagctgctgtacagatcacgcctgcgccacagagtccgcccctgccgccgaagcgcttagcgacgcccgctatagctggcaagttgatggcatggactgcgccgcctgcgcccgcaaggtggaaaccgcggtccgtcaggtgcccggggtcagtcaggtccaggtgctgttcgccacagaaaagctgctggttaacgccgagggcgatgtccgcgctcaggttgagaacgcggtccgccaggcggggtatacgctgcgcgatgccgatgctcccgcagcagagcaaacccgagggtcgctgctgcgcgacaatctgccgttactgacgctggttatcatgatggccttgagctgggggctggagcaggccaaccaccctgccggtcagttggcctttattgccaccaccctggttggcctgtggccggttgcccgccaggcgctgcgcctgatcaagagcgggagctggttcgccattgaaacgctgatgagcgtcgccgccatcggggcgctgtttatcggcgccaccgcggaggcggcgatggtcctgctgctgttcctgatcggcgagcgtctcgaaggctgggccgccagccgcgcacggcagggggtgagcgcgctgatggcgctgaagcccgacaccgccatccgtctgcgcaacggcgtacgggaaaccgtcgcccagcgcgacctgcgtcccggagatgtgattgaagtggctgccggcgggcgtctgccggcggatggccagctgctgtcgccgtttgccagctttgatgaaagcgccctgaccggcgagtcggtgccggtggaacgtcaggccggggaacgggtagcggcgggcgccaccagcgtcgaccgcctggtgcagcttaccgtgatatccgaaccgggcgacagcgccatcgaccgcatcctgaagctgattgaagaggctgaggagcgtcgggcgccgatcgagcgcttcatcgaccgcttcagccggatctacaccccggccattatggtggtggccttgttggtcgccattgtcccgccgctgttcttcgccagcgcctggctgccgtggatttataaagggctgacgctgctgctgatcggctgtccgtgcgcgctggtcatctccacgccggcggccatcacctccggcctggcggtcgccgcccgccgcggggcgctaatcaaaggcggcgcggcgctggagcagctgggccaggtgcgccaggtggcgttcgataaaaccggcaccctgaccgtcggccagccgcaggtgacttcggttattgccacggccgaagttgacgacaacgcgctgctggcgctggcggcggcggtggagcaaggctccagccacccgctggcgcaggctatcgtccgtgaagcgcagcggcgtcagctgagcattccgcttgccagcggccagcgggcgctggcgggctctggtatcgaagccgaagtcaacggcagccgcatcctgatctgcgcagccagcaaagccgccccggcagagcatgaggcgcagatccagcagctggaaagcgccgggcaaacggtagtgctggtgatgcgcggcgagacgctgctcggcattctggcgctgcgcgataccctgcgcgacgacgcgcgtcaggcggtgaatgctttacatcagttgggcgttcaggggatgatccttaccggggataacccgcgcgccgcggcggccatcgccagcgaactggggctggaattccgcgccggtctgctaccggcggacaaggtcaacgcggtgatagcgctgaatgccgacgcgccgctggcgatggtcggggacggtatcaacgacgcgccggcgatgaaagcggccaccatcggcatcgccatgggcagcggaaccgacgtggcgctggagacggccgacgccgcgctgacccataaccgtctgaccggcctggcgcagatgatttccctggcgcgcgccacccacgccaatatccgccagaacatcgcgattgccttagggctgaaggggattttcctcgtcaccaccctgctcggcctgaccggtctgtggctggcggtgctggcggataccggcgccaccgtgctggtaacggctaacgcgctgcggttattgcgtaagaagttgtagcatcgataccggcttccctgctcgcgctacgcttagcagggctacggttccagaccgtcgggtagcccggataaggcgctacgcgccgccatccgggagaggctcagtggcttttgcggatcaggtagcggtacggcagggcttcggtttcctgggccaccagctcatgctccataaagcggcagaatcccgggatatcgcgggtggtggccggatcgtcagcaataatcagcagcgtctcgcccaccggcatcgtccgcacggttttacgcaccatcatgaccggctccgggcagcggagtcccagggcatccagggtgtggtcaggagtggagaaaagttcgctcattttagtctcacgtcaacaaaacggccctagtttaccccctgctcgccagtacgcaagccaggttaacgtttgcgcgaaaaacaaccattgcattacgccggcaacgcagtatcatgcagccgtttttaattgggttccctcaccccaacgttccgctgccgattgctcattcacctgaagcatgacgggcataaaaaggtcacaatatgaatccgtttactaccgtacagcgcaaaaaagcgctcgtctggctttcgctatttcatttgctggtcatcacctccagcaactatctggttcagctgccgatctccatctttggtttccataccacctggggcgcgtttagttttccgtttattttcctcgccaccgacctgacggtgcggatttttggcgccccgctggcgcgacgcatcattttcgcggtgatggtcccggcgctggccatctcttacggcatctccgcgctgttctacatgggcgaatggcagggctttgccgcgctgggcacctttaatctcttcgtcgcgcgcatcgccgtcgccagctttatggcctatgcgctggggcagatcctcgacgttcacgtctttaaccgcctgcggcagagccgccgctggtggttggcccctaccgcctcgacgctgttcggcaacatcagcgataccgtggcgtttttctttatcgctttctggcgcagcccggacccgtttatggccgcccactggggggaaatcgccctcgtcgactacagctttaaagtgcttatcagcatcattttcttcctgccgatgtacggcgtgctgttaaatatgctgttgaaaagactggcggataaatctgatttgtcggcattacagccgagttaaaggtactcgcgggctgatgtgttaagatagccggatgagccattagtggccgtttatcgaaaggaagatgtcaatgcgcaatttggttaaatatgtcggtattggcctgctggtgatggggcttgccgcctgcgataacagcgattcaaaagcgccaaccgttggcgcagcagcggagagcaatgccagcggccaggcaatcagcctgctggatggcaagctgagcttcaccctgcctgcgggcatggccgaccagagcggcaaactgggtacccaggcgaacaatatgcacgtctactctgacgctaccggccagaaagcggtcatcgtcatcgtcggcgacagcaccaatgaagatctggcggtgctggcgaaacgcctggaagatcagcagcgcagccgcgacccgcagctgcaggtggtgagcaataaaccgctggagattaaaggccataccctgcagcagctggacagcatcatctccgccaaggggcagaccgcctggtcttccgtgatcctcggcaaagtggatgacaagctgctgaccctgcaggtcaccctgccggcggataaccagcagcaggcgcagaccgaagcggaaagcatcatcaacaccctcaccatccagtaattactggcctggtgcgctggcctccggttcgctaaccgggggccgtttttttagccgccagcccaacagcagcgccgccatcaccagccccgccgcggcgagataaatcatcgagatcccggtccacgccatcagcaatccggccagcggcccgctgacgcccaacgacaaatccataaacacggtataggtcgccagcgccgacccctgattgtgctgcggcaccgctttcaccgccaccacgcccagcgccggaaagaccagcgaaaagccagccccggtaaggaaagtaccgattttcgccatcatcggcgtatcggcaaagccgaccagcagcaggccgatcgcctccacgctaaagcagagcatcgccacgttcagcccgccgagtcggttaatggcgttgggaaacagcagccgcgcgccaacgaatgcgcagctgaataatgtcagcgcgaaagccgcgccgtcccaacctttggcgtcataaaatagcgtgataaaggtggcgatcaccccaaagccggcggaggccaacgccagcgccatgccgtagggccagacccggccgagcaccgcgcgaaacgacatcgctttgcctttggcagccttcaccgccgcgcggggcagcgcgcagaggatagccaccagcgctaccgccataatgaccccggccagaccgctgagtccaatgtgcgaatagcacagcacgccgagcggcgcgcccatcgccatcgccccataggtcacaatcccgttccacgagatcacccgcccgatatgcagcgaaccgaccacgccgacgccccacagcgtcgagcctgtgccggcgaagctctggccgataccaaggatcacccgtccgaggcatagcagcagcaggctaatcagtggccagccgctgccccaggcggccagcagatagctcaaaccgctcaaaaagcagccgccgaggccgaagacgacaatctttttgggccccagcaggtcggcatagcgcccggcatgcgggcggctgagcagcgtggcgaaatattgcaggctaatcaccagcccggcccagaaagcgctaaagcccatgacatcatgaacatagccgggcagcaccgccagcggcaggccgatggtgaggtagctggcaaagttaaagataacgacagagacaatccgcagattgaggcgcagtccattaagcgccggttcggcgacgggttcgggcatcaggttccaccagatttcgacaaccagctttcactattaccacgctgtcggcggaaaagcagccctcctttcggaatattggcagtcggcgaaccgctacacttatctggcgcgactcataaaaggaatacctatgtcccctccgcaggctgataaagccgggcttcatattttacttaagctggcggcgctggtgattatcctcgccgggatccacgccgccgccgatatcctggtgcagctgctgctggcgctgtttttcgctattgttctcaacccgctggtcacctggttcattcgccgcggggtgcggcgtccgttcgccattaccctggtggtgacggcgatgctggtgatgctcaccgcgctgctcggcgtgctggcggcgtcgctcaatgactttgtcgccatgctgcccgatttcaaccgcgccctgacgcgcaagatcctccagctccaggagtatctccccttccttaatctgcatatcaatccagagcggatgctgcggcgcatggattcagaacggctgatgacctgggccacgacgctgatgacccagctttccggggcgatggccagcatcgtgctgctggtgatgacggtgatctttatgctgtttgaggttcgccacctgccctacaaactgcgttttgccctcaataacccgcgcctgcatatcgccggattgcaccgggcgctgaaaggcgtcacccattatctggcgctgaagacgctgattagcctgtggaccgggctgattgtctggctggggctgctggcgatgggggtacagttcgccctgatgtggggggtgctggcgtttttgctgaactatgtgccgaacattggctccgccatctccgctatcccccccatgctgcaggcgctgctgttcagcggcatctatgagtgcctgttggtaggggcgctgtttctggtggtgcatatggtgctgggcaacatggtggagccgcgcatgatgggccaccggctggggatgtcgaccctggtggtgttcctgtcgttgttggtctggggctggctgctggggccggtgggaatgctgctctcggtgccgttaaccagcgtctgtaaaatctggatggaaaccaccgtcgggggcagcaagctggcgatcctgctcggcccgggccgtcccaaaagccggctccccggctagcggcgtttcaccggccagaagatggtcaatacgccggcgacgatgatcgccacgcccagcagcgattgccagtagaacggctcatgccagccgggcagccagatggcggcggcccacacgaggatatagctcaggctcagtagcgcatacgctttcgacagcggcaggcgatggagggcaaagtaccagcagaccatcgacagcaggtagcccagcaggccgaaaaacaggccgaaagtcccgggctggaaatgcagcagatgctggagaaatgccacaatatcggtcagcggcggcaaggccaccatggcgctgcgcagcagcaactgcgcggcgctgacgaggccgacgctgagtaatgcccagaaaaagcccatcagacgctggtccccagaatgacaatgcccacgacgatcaacccgacgccaagccagtggcgacgggcgaccggctcatgccagatgccccagcccgcgagggtaacccagacgaaattcagactcagcatcggataggcgatgctgaccggaatagactgcaggacgctcagccacagcagcatgccgcagcccagacataacagcgccatccccaaccagaagagtatatggcgactccgccgtccgcgacgggacgggcgggtcgcctgtttctggcagagctgtccggcgcagctcagcaggctggcgcacaccagacagatccagacgctcattgcggcaggtactgaaggaaaacgacccggcccagctcgtaggcgttatccggtttcggtaacggtaagtcgagcatactctctcctttatccatcaacagcaccagcgagaccggcccctgctgacgatgcgcggccagccagtcggcaaaaccggcctggctgacaaagcttccctgagcatccggccagtcgagaccgtacttcagctcaccctgtttgtcgaacataataatatcgcttcgcttcagctcccaggccaggccgccggcgatcccaacgttgttggtcaggacgtaacggctgggctgcagggattcgctgacgatctccacaaggaactgcggctgtttgctgtcgataacccggtccgggatggcgaagcccaccagcagcgccaggccgagcggacagagcgcggcgaggctccagcggcggccagagtctttcatcgccagccagcccatcagcgcccagacggcaaaagcgatcgccgccagcagacatttatacagctcaatcttggtccacaccggcttatgcatgaagccccacggcgagaccaccagcacggcgataagccccagcaaaccaacgcccaggttgatcataccgttgatgcgcaacgctttcgcgccggtctttgcggcctccagcgcgtagcgggccatcaggatcgacagcggcgcaaagcacggcagaatataggtcggcagtttgcctttggcgatactgaagaacaggaacggcatcgccacccaacctaacagatacagcgcgccgcgggcctcatcgcgctcaagccagccgcgctttagcgcccccggcagcagggccagccacggcagactgccggcgatcaggaacgggatgtagtaccagaacggcgctttgtgctgggcgtctttttcagcaaaacgctgaatatgctcgacccagaagaagtagcgccagaagtccggctcgcgctgggcgatagccagcccccagggcagcaccaccagcgtacagacgattaccgccagccagccgtaggtcagcacttcacgccagcgtttacgggcgatcacccacggcagaacgcccaccaccggcaccgccagcgccaggaagcctttggtcatcacccccatcccgcaggcgacgcccagcagcacgtagcccagtattttgccgctgcggctgtgcgcctgcgccgcgccccagaagctgcacatcgccagcgccagccacagggtgatcatcgggtccagcaccgcataggtgccaatcgcatacaccagcatcgcggtgaggaagataaccggcgacaggatagctacccgcttatcacgaaagatccgccacgccagccaggccaccagcagggcggtcatggtgatggcgaagaccgacccgaagcgtacgccgaagttattatggccaaacagccactgaccaatactgttgatccagtaaccggcaatcggtttttcgaagtagcgcaggccgagaaaatgcggtaccacccagtcgccggtggccagcatttcacggctgatctccgcgtagcgggtttcgtcgggttgccagagcaaacggaaattgagcggcagcagataatacagcgcaaacagcgcaatcagagagacgccatagcgaatgcttttcatcaaacacccgaagtcagtaattgttcacgtccgagccagccttcccggccagccagttcaccacgaaccactttgcctgagggcagctcgctaaagtcagcgggcagcagctggctcagtgggcaaaactgaatttcttcttccgccgccatggtcagtagttcattgaactgatcggcgtaggcaataccttccacttcagcgtgaatggtatagaccggcacgcccgcatcgcgatggatgcaatccagcaggtagcggttaaagccggcgatatccaccgccgtgcccaccgcctcgtcccaggtcggcaacgtgaccgggatctgcaccgtaccggaaacgccgctgccgagctggggcagaaacggccgcgtgccgcgacagtcgctgttgtagagaaaatcgaaggattctttggctttaaccacccgctgatcagcgcgccagccggcgacggccgagcaggtcaccggccggccgatgatgcgctcgagctccagcaggccgcgctcaacctccagcgccagcctttcctgcggccagacgccgctccacgcctgccagctgtagtggtcccaggcgtgcaggccgacttcatgagattcggcggcggcgcggatcaccgcttcgttccctgcgccgatgcggcgccccggccaggcggtgccggccagcagaatatcccagccgtacagcgaggcggctctggaacgcagcatcttccacagaaacttcggttttaccaggcgccacaggtggcgccccatattgtccggcccgacgctgaagaagaaacttgcctgaatcccgtgcttgcccagcagggccagcagccgcggtacgccatcacgcgtcccgcgaaaggtatcgacatctatgcgtaagccgacttgtttcatgagtttttatcgtccgtgagctcaacggtgcgcaggaagaagtccagagtgtgttcaacggtctcttccatctcgacggtcggttcccagttcaggcagcgtttcgcgttgcgaatgctcggtttacgatgctcaacgtcctggtaacctttaccgtagtaatcgctgctttccacttcgcggaagccggcgaacggcgggaagcgatcgcgcagcggatggcgctcgaagcaggcgagcagcatttccgccagctctttgatgctcgcttcgttttccgggttaccgatgttgatgatctgaccatcgcagcgaccgtctttgttctcaatgatgcggaacaacgcttcgataccgtcgctgatatcggtgaagcagcgcttctgtttgccgccttcgataagcttaatcggcgaaccttccaccaggttgaggatcagctgagtgatggcgcgggagctaccgatacgtgcggcattaaggttatccagacgcggccccatccagttgaacggacggaacagggtgaacttgaggccgttcttatcgccataggcccagatcacgcgatccagcagctgcttggagaccgagtagatccagcgctgtttgttgatcggccccaccaccaggttggagctatcttcgtcgaaatttttgtcggtgcacatgccgtacacttccgaggtcgacgggaagataatgcgcttattgtatttcacgcagtcgcggatgattttcaggttctcttcgaaatccagctcgaacacgcgcagcgggttgcgggtgtattcgataggcgtggcgatggccaccagcggcagcaccacgtcgcatttcttaatgtgatactcgatccactcggagtgaatgctgatatcgccttccacaaagtggaaacgcggacagtcgagaaaacggctgatggcgtcggagccgatatccagaccgtaaatctcatagttgtcgtcctgcagcaggcgctcggtcaggtggttaccgataaagccgttaacgccgaggatcagcacccgggtgcgacgcttaatcgccaccaccggtttgctgctgatcaccgccccggacaccaggcccagcgcctgcgccagctgagcgccctgcatgtacacgccgcgttcggtctggccggtgacaatctccagcgccccgtcctggcacgagacgatcagcggagcaatggagagcacggtgcccggtttagctgctggcaaatcgtggcgaacgcgggatttccagacgataaacttgttcgctccggcgtagccgaaggcgcccggccacggatccgagaccgcacgcaccagattgtgcagggtctgcgccggcagctcccagtccagccggccatcttccggggtacgacgccccacataggttgcctggctgtgatcctgcggacgctcatcggtggtgccggcgaggatcgctggcagcgcccggctcagcagctcagtggcggcagcgcacagcttacgatgcagcgtcagggcggcgtcatccgcgccaatcgccacggcctgctgggcgacgatatcgccagcgtctgcgcggttcaccatccggtgcagggtgacgccggtttcgctttcgccattgaccagcacccagttcagcggcgcgcggccgcgatattttggcagcagcgaaccgtgcaggttgaacgcccctttcggcgccagattgaggatctcatcgcccagcaggttgcgatagtagaaggagaacagcacgtccggcttcatctcgcggatacgctcaatccacagcggatggttcacgtcttccggggcccacaccggaataccctgctcggcggcaaggcgcgccacggagccaaagaaatggttttcgccagggttatccgggtgggtgaaaatagcagcgatatcatacccggcgtccagcagggactggataccggtgcagcccatatcgtgataagcgaagactacggctttcatgaacgatcttcctctttagatgccgtttccggctggcgaacaacacgttgaataaagtagcgggggcgggcgcgcacgtcgttatagatgcggccgatatactccccgagcaggcccataccgacaaactgggcgccgatgaacatgaacagcacggcgaagagcataaacaccccttccgccgcccactgtgggccgaaggccagacgcagcaccaccagcagcaggccgaaggcgaagcccagcagggcaatcacgctgccgaaaatgctgagcagacgcagcggcgtggtggtcagacaggtcaccaggtcgtacatcaggttgatcaggcgcataaagctgtatttggagtcgccgaattcgcgctcggcgtgcatcaccgggatctcgaccgcgcgccgggcgaaggtattcgccaggatcgggataaaggtgctgcgctcatggcagttgagcatggcgtcgatgatatggcggcggtaagcgcgcagcatgcagccgtagtcgcccatcgctttgccggtggtgcgctggatcaggcggttgatcatcttcgacgcggttttacggaagatgctgtcctgacggttctggcggacggtgcccaccacgtcgtaaccttcatcagccttcgccaccagccgcgggatctcctccggcgggttttgcaggtcggcgtcgagggtaataatcagatcgccggttacatggctgaagccggccatgatcgccgagtgctggccgtagttacggtttaacagcacggcgacgacgtggctgccttccgcctcggcggcttcggtgagcatgcgcgcggaatcgtcgctgctgccatcgtcgatcaacagaatttcatattgccgccccagggtggcgcaggcggcatccgtacgacgaagcagttccggcaggctatcctgttcgttataaaccgggataaccaccgagaccttcttcacgggagggtaagtaagcatatcaacgtcctgacaactggcgcagtgcggagataacgcgagtgacatcgtcatcggtcatatccgggaacaacgggagagagcagatgcgggcgctgttccattcggtattcggcagggaaacctcagggaagcgctcgcggtaatatttttgcgtatgggccgcacggaagtgcaggccggtgccgatgcccatcgccttcagcttttccatcagcgcgtcgcggctgatgccgcacgcggcctcatcgacgcggatgataaacagatgccaggcgtgctggtgatcccaggtcgggacgctcagcggtttaaacggcgtgtccgccagctcgcgcaggtagcgctgggcaatctcggtccggcgctgattggcgtggctcagtttttccagctggaccagcgccagagcggcgttgatatcggcaaggttgtacttgaagcccggggtgatcacctccgcctgtggcgcgcggccgtgggtctggcgatcataagcgtccacgcccagaccatggaatttcaggctacggatgcgggaggccagctcgtcgtcgtcggtgacaatcagcccgccttcggcgcaggtcatgtttttgatcgcgtggaacgagaaaatggcggtcccctgccagcccacgtggcggcctttataatgggtaccggccgcatgggcggcgtcttcgatcaccgaaatgccatggcgctcgcccaccgcgcgaatggcgtcgatgtcggctggcgcgcccgcgtagtgcacgggaattatcgctttggtacgcgaagtgatcgccgcttccaccgctgcaggggtaatcatcagattgtcgttatcgacatcgatcatcaccggcgtggcgcccagcaggcagatcatattgagagtggagacccaggtctgggacggcgtaatgacttcatcgccggggccaatacccagcgccatcagggtcacatgcatcccgccggtcgctgaactgacggcaatcgcgtggcggttgccggtcagctggcagaatgccgcttcgagtgcctgattcttcggtccggtggtgatccagcccgacgctaaaacttcacgcagcgcagccagctctgcgtcgcccatcgacgggcgcgaaaaaggcaaaaaatcgctcatcatcatcctgttctgtagatgacccacgcacgaatctgggtcgttagaataaaatatcctgcgcctgcggacttaaacgaaattaaaatgaagtgagttcagcacggcattccatttcagggtatctcgaccactattaatgtagtcgaccttgcttaggataatattaagaaattaatatttcttcagaataagaaataacttattaataaacagtatgataggagttttttatggcagaaatttgacggaggagcgttcctgtcacgaaaagagaacaggaacgcaatagttgaaattaaacgagaactaaaccagttcacaatttattattctgtcattgtcacgcttaatgacaaaaagttagcgcagatcacaaagttatttctgctgaattacaaatttgcaggaaaatccgcaggcaattcgctcgccgggcaattaatgacctcgtcattatccgcgccacagtcgcgaatgaaggtgatagtggcgaactcgtcaatcacttccgtcgggtaggccgggccggcatcgcgatacgaattcatcagcggaatatggtcgttctggaagcagatagttttttccgggttattcatgatccagcgcgggaagaaaatagtgccgtggaacagtttgtcgcccaggttgacgatcaggctgacgtcggtgccggtcggttcggtccaggagattttgtagatactttcccccacccgcacaatgtacgcttcctgatctttcacccagcgattgccgacgatgccgctgtgaatacggtagtcgagggtgtggccatttttgacgtaaatctcgtagttccagccgttgtcgtaggtatagaccagatgtttaccgataaagccgccgaggtcatgtttgtcgaaagtgctcatcatttattctcctctgttttgttgaggacagcatacgtctttaaaaaatgaatgaataacgctatgtttggattaaatacattcaaattttagattgattatgcacaagacaaccctggagcagtgggcgttactcgaaaaggtagtggaattggggagctttgccagagcggcggaggagaccaatcgcagtcagtcatcggtaagctataacctcgcgctgctgcaggagcgcttaggcgtggcgctgctggcgccgtccggccggcgggcggtgctgacgccggctggcgaactactgctgaatcaggtcaagccgctgctgcaggccttcgcctacgtcgagacgcacgccgccactctgcgcaacggggcgcggacccgcctggatctggtggtcgacagtattttcccgcgccagcggctgttcgcgattttacgccagtttcagcagcgctatccgcagacccaggtcaggctcaccgaagtgctggaaaacctggatgacgagagcgcggcgcggacggaagccgatgtgatggtgttgacccgccgccaggatattaccggccgcggggagtggctgatgaatattgatttcatcgccgtcgcccaccgcgaccaccctctcgccgcgctggacggaccgctggaggatagcgcgctggcgccgtggccgctggtgcgcattgccgatcagggcggcgatagccaggcgccgcgagacgcctggaccttctccaccattgatgccgccattgatgcggtgatgtatcaggtcggcttcggctggctgccggaggagcgcattcgcccccatctcgaccagggcgtgctgaagcggctgcccctcagccatggcgcgcgccgcgcgacgccgctgcatctgatcgtcaagcgggacctggcgccgatcgacgaacaggtggccacgctgctggcgttgttccggacgccctgaggggtaaggcggcgctggtcgcctgggcgtaatgatacgattttcttatactttccggcgcaatattgatccaggttactcccaaagtatgatgaatcactaaaatcgtcatactttcctgtcgttgagattgccgtcttgtctattatccgcctcaccctgctggcgctgctcgcctgcgtccctctgctggctcaggccgcgccgtaccagctcaccaccgcctggccggttaacgtcggcccgctgaatccccatctctatacgcccaaccagatgtttgcccaaagcatggtctatgaaccgctggtgaagtatcaggctgacggcagcgtacagccctggctggcaacccgctggcgtcactccgccgacggcaaaacctggtggttcaccctgcgcgacgatgtggccttctccaacggcgaaccgtttaatgcccaggccgcggcggccaattttcaggcggtgctggccaaccgccaacgccacgcctggcttgagctcgccaaccaaataaccgacgtgcgggccctcagcgccaccgagctgcagatcaccctgaaaagcgcctacgcccccttactgcaagagctggccctgccccgcccgttccgcttcatcgccccctcgcagtttatcgatggcggcaccgccaggggcattaaagccccgatcggcaccggcccgtggcggctggcaagctcgcagctcaatcagcgcgatgtgctggtgcgcaatgagcgctactggggtcgcaaacccgcgctacagcaaatcaccatcaaggtgatccctgacgccaccagccgggcggtggcgttcgaaaccggggaaatcgatatgctctacggcgatgaagggctgctgccgctggacaccttcgaacgctttcgccatcaccccggctacgtggcgcgcctgtccgccccggcggagacggtaatgctggcgctaaacgccagccagggccctacccgcgagcaggcggttcgtgaggcgctcaactacgccgtcgataaacagacccttgtcgatagcgtgttgtatggcacccagcaggttgccgacaccctgtttgccccctccgtcccttacgccccgcagaatctgacgccgcgccgttacgacccgacaaaagcccgcgccctgctggaacaggccggctggcagcagctggagggccagccctggcgacaaaaagccgggcaaccgttggcgattgagctggcgtttattggcaccgacgcgctggctaaatcgatggccgaaattattcaggccaatctgcggcaggtcggcgtgcaggtcaccctggtgggcgaggaggaaagcagcatttacgcgcgccagcgcgaaggccgcttcggcatgatcttcaatcgcacctggggcgcgccctacgatccgcatgcctttttaagctcgatgcgcgtcccttcgcatgcggattaccaggcccagcgcggcctgccagacaaggcactgattgataaagagattagtgaagtgctgaccaccggggacgaggcgcagcggagaaaactgtaccatgatgtgctgacccgtctgcatcaggacgcggtgtatctgcccatcagctatgtctcgctgatgtcggtcgcgcgccaggaggtcggggagatcccgttcgccccggtgaccagcgagatccctttcgaccagattaccccggtaacgccataatgctacgctatattttacgccgcctgctgctgctgatcccgctgctgctcgccgcctcagccatcatctttctgctgctgcggctcggcgccggcgacccggcgctggattatttacgcctgtcgaacctgccgcccactgaagagatggttgcctcgacccgcgagctgctggggctcaaccagccgctggcaatgcagtatctgcactggctatggcgggcgctgcacctggatttcggtctctcctatgccacccagcgcccggtgctggacgacctgctgcacttcctgccggccaccctgctgctcaccggcgcggcgctggcgctgatcctcgtcacctccctgccgttgggcatctgggcggcgcgccatcgcgatcgcctgccggactatatcgtacggctgattgccttcctcggcgtctcaatgcccaacttctggctggcctttctgctggtgatgctcttttccgtgcatctgcagtggctcccggcgatggggtatggcgactggcagcacctgattttgcccgccgtctccatcgcctttatgtcgctggcgatcaacgcccgcctgctgcgcgccagcatgctggacgccgccagccagcgtcacgtgatatgggcgcggctgcgcggattgagcgcgcgccaggtggagcgccgacatatcctgcgcaacgccaccctgccggtggtgaccgccatgggcatgcacattggcgagctgatcggcggcaccatgattatcgaaaatatctttgcctggcccggggtcggccgctacgcggtttccgccattttcaatcgcgattacccggtgatccagtgctttaccctgatgatggtgacggtgttcgtgctggctaatctggcggtggatgtgcttaacgcggcgctcgacccgcgcctgcgccgccacgaggaggtgagcgcatgagagggctacaaagttttcgctggccggtaaaactcgccctgttagtcatcgcgctgctggcggtcatcgccatcggcagcggctggtggctgccctgggatccagcggcgattgaccttcagcagcggctgctgccgccgggcgcagcgcactggctcggcaccgatcatctcggccgggatattttctcacgcctgctggccgccacccgcgtttcgctgggggcggtgatggcttgtctgctgctggtgctgctgatcggcctggcggtcggcggcagcgccggactgctgggcggccgtgccgaccgcggcctgatgcgcatcgccgaactgtttatgacctttccgacctcgatcctgtcgttctttatggtgggagtgctgggtaccgggctgaccaatgtgatcctcgccattgcgctgtcacactgggcctggtacgccagaatggtgcgtaacctggtggtttccctgcgccagcgcgaatttatcctcgccgcccgtctgagcggcgccagccagtggcggctgttcagcgaccatctggccggcgcggtgatcccctcgctgctggtgctcgcctcgctggatatcggccatatgatgcttcacgtagccggcatgtcgttcctcggtctcggtgtcagcgcgccgacggcggaatggggggtgatgatcaacgacgcccggcagtatatctggacccagccgctgcaaatggtctggccggggctggcgctgttcatcagcgtgatggcttttaacctgctgggcgacgcgctgcgcgatcgtctcgatccccacctgatcgcggagcatagccactgatgccgcagaagatccaactggaacagatctcgcttgccgctgaccgaccgctggtcagcgacgtctccttcaccctgcgccgcggccaggtgctggcgctgctcggcagcagtggttgcggaaaatcgctgacctgcgccgccgcgctgggcctgctgccgcccggcgtcaggcaaaccgccggccgggtgcttctcgacggcattccggtgcacggcgaacagctgcgcggggcgaccatcgccaccatcatgcagaacccgcgcagcgcctttaacccgctgcagaccatggccgcgcatgcccgggaaacctgccgggcagcgggtcgtgaaacgaatgacgccgtgctgctggcagcgatggaggaggtcggtctggacaatccgcgggcgctgctgaagcgctacccttttgaaatgagcgggggcatgctgcaacggatgatggtcgctctcgccctgctcagccgcgcgccctttatcatcgccgacgagccgacgaccgatctcgatgccatcgcccaggcgcgcatcctcgacctgctggcggatattgtcgccaggcgcggtctgggactgctgctggtgacgcatgacatgggcgtcgtggcgcggctggcgcatcacgtaacggtgatggagaacggtcgcctcgttgaacactgcgatgtgaatacgctatttagcgccccgcggcacccgctcagccagcgcctgctggccgcgcatctggcgttatacggtctggagaaaacaccatgaatttactcagcgtcaccggggtgagtcacgattatcctcaccacggcagggtcctgcatgcgatccatctcgccatcgcccctggcgaaacggtggccctgctcggacgcagcggctgtgggaaaagcaccctggcgcggatgctggtgggtctggaaacgccgcagcacggcgatattgcctggcgcggcacgccgctggccgccctgaagggcgaggccatcggcgccttccgccgtgatattcagctggtatttcaggatgccttcagcgcggtgaatccgcgcaaaacggtgcgcgagatcgtcagcgagccgctgcgccatctgttacgcttgtcgcgtgaggcgcgtgcgcggcgggtggaagagatgctgctggccgtcgacctcgcgccgtcgctgctcgataagcgcccggcgcagctcagcggcggacagctgcagcgcgtctgcctggcacgcgccctggcggtacggccgcagctgttgatccttgatgaagcggtttcaaatctcgacctgctgctgcaggcggagattatcgccctgctgaagcgtctgcaggcgcagtttgacaccgcctgcctgttcatcacccatgacctgcggctggtggagcgcttttgccagcgagtgctggtgatggagcacgggcgcatcgtcgaaaccgcaacggttagtctaccgctacgcctgcgttcccctgccggacaggcgctccagcaggcggtgctccccccttttcctgccactctgcttaacgaggccatgccatgcagcgcgtaaccctgacccttgatgatgacctgctggccgccctcgatgcgctcagcgcccgccgcggctaccacaaccgttcggaggcggtacgcgatattctgcgcgacgccctcaaccaggatcctccgtcgccggaatcacggcgcgggtatgccgtcctgtcgtacgtgtatgaacatgaaaaacgcgaactggcgagccggctggtggccacccagcatcatcatcacgatctctccgtcgccacgctgcatgtgcatatcagtcatgacgactgcctggagattgcggtgctgaaaggtgatatggccgaggtacagcattttgccgacgacgtgattgcccagcgcggcgtgcgccatgggcatttgcagtgtttagcggatgattaattatttgaaaattcttgggtggtttatcaacagttgataaaccatataaattatacgctttgttaattatcccgcttcgccaataatggcgcctcatttaacgatctcgttatggcgaggctcctgcataaatacaagttaccgccctgttggtatcgagagagaccactcagggaaatacaggcttccatcgaatcaaggtgttgccaaggtaacttctggcggtcatgaccgttcagatacgttatgcagtgctaaaaccaggacgtagggatctgcctgcgctaaccctgtcttgttcgcccctatgagtgattttttatagggatttttaaacatgtcttccattcaactctgcgccgcccatcaggcgacctctggcttcgacggcgatgcgatcgtccagtacatgcgtaccgattttattacgctgcaggaacatctcagcgttcatgaggcgcgcgaacactttatctcccagctggccagcgatgatattcccgggcaggtgtttgtcgtcgccggcaagaagctgcgtggcagcctgtcggtcaaaaagctactccaggaaacggatatcaaccagtctatccgccacctgatggacagctgcctgtttcgcgtcaaacctgacgatgagcgccagcaggtgattgccgagctcagcgagcgcggcctcgacctggtccccgtcgtcgataaaggcgagctggtcggctgcctgatggagaaggagatcgcccatctgctggaggatgacgtcaccgaagatgctcagctgcagggggcaacgctgccgctggaaaaaccgtacctcgagatcagcccctggacgctgtggaaaaaacgctcggtgtggctgctgctgctgttcgtggccgaagcctacaccagcagcgtactgcagcatttcgaagaagccctggaatcggccatcgcgctggccttctttattccgctgctcatcggcaccggcggcaacagcggaacgcagatcacctcgacgctggtgcgctcgatggcgctgggggaagtgcgactgcgcgatatggggcgggtgatccgcaaagaggtatcgacctcgtttctgattgccctgaccctgggcctggcgggctgcctgcgcgcctggatgatggggattggcatggaaatcacgctcatcgtcagcctgacgctggtgtgcattaccctgtggagcgcgattgtctcctcggtcattccgatggtgcttaagcggatcggcattgacccggcggtagtttccgcgccgtttatcgccacgctgattgatggcaccgggctgattatctatttcaaaatcgcccagtattttcttgggttgaactgatcatatacgtccgggcaccagggcgcccggacgcgtagattacccttccaccagcgcctgcgcgcaggcccaggcgcttgaccacgcccactggaagttataccccccgagccagccggtaacgtccatcacttcgccgataaagtagagacccggcgccttacgcgcctccatagtacgcgacgagagttcgttggtgtccacgccgccgagggtcacctccgccgtccggtagccttcggtgccgttcggctgcacgcgccaggcggttaacgtctccaccagcgtctgctgatcgcgaacgttcagttgcttgagcgtcacatcaggtatctgccccagctgctgcagacactccaccagccgcttcggcagctgcatcgccagggtgttcttcaggctctggttgggatgcgcgctgcgctgctcgttaaggaagtcatcaagatcgcagtccggtagcagattaacggtgacgaactcgccgggctgccagtagctggaaatttgcagcaccgccggtccggaaaggccgcggtgggtgaacagcagattttcgcgaaacagagtgccgttctcggcggtaatggtcgacggcaccgacacgccggagaggacctgcagctgctcaagcaatggcttgtggagggtaaacggcaccagccccgcgcgggtcggcagcaccttcaggccgaactgctcggcgactttatagccaaacggcgaggcgccgagccccggcatcgacagaccgccggaggcgatcaccagctttttggtcaccagcgtttcgccgttcacctgtagccggtagccttgttcatcgcgctccacgctgaggatttcgctgcgcagacggatctgcacgccgcccttttcacattccgcgagcagcagattgacgatctgctccgccgaatcatcgcaaaacagctggccgagggtcttctcatgccaggcgatgccgtatttaccgaccagctcgataaagtcccactgggtgtagcgcgccagggcagatttgcaaaaatgcgggttttggctcaaataggccgccggttcaacatacatgttggtaaagttgcagcggccgccgccggacatcagaatttttcgccccggctttttgccgttatccagcagcaggacgcggcagccaagctggcccgcctgcgctgcgcaaaacattcccgccgctccggcgccaacgacaatggcatcaaacctttccacaccgcgttcctcgttccccaattgtcgggttttgtaaatatttcactctggtcacaccagcgggaaaaatcccgcattagatacatcattgaaagatataggattactcccaacagggtaaaacctaaacaggaagaaaatcaaaaaaagtctatatttcactttgcccgcgccgctaaagtcactgataatgcgccgcgttcatgtcctcaaaatggcgtaacgtcctatgctacatttatttgccggtctggatttacataccggactattattattgcttgctttagcttttgtactgttttacgaagcgattaacggtttccatgataccgcaaacgcggtggctacggttatctacactcgcgcaatgcgctcacagctcgctgtggcgatggcggcgctcttcaacttcttcggcgttctgctgggcggtctcagcgtagcctatgccatcgtgcatatgctgccgaccgatctgctgcttaacatgggttccgcacatggcctcgccatggtgttctctatgcttctggcggcgatcatctggaacctcggcacctggtacttcggtcttccagcttccagttctcataccctgattggcgccatcatcggcattggtttaaccaatgcgctgatgaccggtacttccgtggttgatgcgctgaatatcccgaaagtcatcggtatttttgcttcgcttatcatctcgccgatcgtcggtctggtgatcgcgggcggcctgattttcctgctgcgtcgctactggagcggaaccaaaaaacgcgcgcgtatccacctgacgcccgcagagcgtgaaaagaaagacggtaagaaaaagccgccgttctggacccgtatcgcgctgatcctgtctgctattggcgtgtcgttctctcacggtgctaacgatgggcagaaaggcattggcctggtgatgctggtgctgatcggcgtcgcgccggcgggtttcgtggtgaatatgaatgcctctggttacgaaatcacccgtacccgcgatgcggtcaacaacgtggaaaccttcttccagcagcgtcctgaactgctgaaaaaagccaccggcgtcgatcagctggtgccttctccggataccaataccgcggccaatggcgagttccactgccatccggcgaacaccatcaacgcccttgaccgcgtcaaaaccatgctgaccggcgttgagaactacgagtcgctaaaaccggaacagcgcggccagctgcgtcgcatcatgctctgcatctccgacaccaccgacaaggtggcgaagctgccggatgtgagcgctgacgaccagcgtctgctgaagaaactgaaaaccgatatgctgagcaccatcgagtacgcgccaatctggattatcatggctgtcgcgctggcgctgggtatcggcaccatgatcggctggcgccgcgtggcgaccaccatcggtgagaagattggtaagaaaggcatgacctacgctcaggggatgtcggctcagatgaccgcagcggtttctatcggtctggcgagctacaccgggatgccggtttccaccacccacgtactctcctcctcggtagcggggacgatgctggtggatggcggtggtctgcagaaaaagacggtgaccagcattctgatggcctgggtgctgaccctgccggcagcgattatcctttcaggcgtcctttactggctctccctgaaactgatttaagcgttattcgttcaaaacgggccagcttgctggcccgtttttttattctgaaacgttagtgccagatcatcagcgcaatcaggctcaccaccaccaggccgcacagggcgctggtcaggataaactggcgacgaacacgttcgcagcgacgaataaattcatcatcgtgatggtcacggtagcgctgggcatagatataccacaccagccgcatctgtttgctgggctgcccgtgcgaggtaaaaaagccgccgccatcaacatactgatagagcaagggatcgcaaccacgtagcaccaccaataatgcacgcaacgatgagaagtagcgtgccatattcaccacacaaacgacacacagggcccaaaacagcgcaatagtgctgatcatacctcctccccggcgacccgcctacggagaaaacctccgcggctaccgctccccaaataacccacgacgataccgtaaagagtgcgattccgatcacatttatttttccgaccggctcattaaatagtgtaggagatccattaatttttttaccacaaggttattcgttatcaatacgtaagacggataaatttgtttaacttttaggtgaacccagtgcattgacggagtgcggggggcgctataaggtaggaaatatcttctacaatgaagtccttaaaggctaccctcccgcgaatgtagcacgcaggacgcgggcgaaacggcagcgccagctgtcaggtccaatggtcatcgacaaacttatggaaggagtaacactatggcttacaaacatattctgattgcagtagacctgtccccggagagtaaagtactggttgaaaaagccgtttctatggcccgcccgtataacgcgaaagtctcccttatccatgtggatgtgaattactccgacctctacaccgggctgattgacgttaacctcggcgacatgcaaaaacgcatctccgaagagacccatcacgcgctgaccgagctctcgaccaacgcaggctatcccatcaccgagaccctgagcggcagcggcgaccttggtcaggtgctggtcgatgcgattaaaaaatacgatatggacctggtggtctgcggccatcatcaggacttctggagcaagctgatgtcctctgcccgccagctgattaacaccgttcatgtcgacatgctgatcgtcccgctgcgcgacgaagaagacgaataaccgtctcgttttatccgcgcaatacgcccgccgatgcgggcgttttttattttcgctttccctcgccatgcggcagaacttcaatccataaaatcgccattcaattagtgtgatcaaccagttattcggcgaaatatctatataataatctattccataagccaataaccgcagcatggcgagttatcagacattttcggcgcgttctggcatacgcgttcatactttttgggaaagtaatacaaggcgaaggaatatgaatacaactgcacctacgggcttgctgcagcaacctcgtccgttctttatgatcttctttgtggagctctgggaacgttttggctattacggcgttcaggggatcctggcggtcttctttgttaaacagctgggcttctctcaggaacaggcctttatcaccttcggcgccttcgcggcgctggtttacgggctgatctccatcggcggctacgtgggcgaccatttgctggggaccaaacgcacgctggtgctcggcgccattgtgctggctatcggctactttatgaccgggatgtcgctgctgaaaccgcagctgatctttatcgctctcggcaccatcgccgtcggcaacggtttgtttaaagccaacccggcgagcctgctctccaaatgctatccgccgaaggatgcccgtctcgacggggcatttaccctgttctatatgtcgataaacatcggttcgctgctgtcgctgtcgctggcgccggtgatcgccgaaaaatttggctacgcggtaacctataacctgtgcggcgcggggctgattatcgcgctgctggtctacttcgcctgccgcgggatggtgaaagatattggctccgagccggatcatcgccccctcagcctacgcaatctggcgctggtgctggccggtacggtggtaatgatttttctctgcgcctggctgatgcataacgtgatgatcgccaacctggtgctgattgttctgtcggtcgtggttattgcgttctttttccgtgaggcgtttcgcctcgataaaaccggacgcaacaaaatgttcgtcgcctttattctgatgatcgaggcggtgctgttttacattctgtatgcccagatgccgacctcgctgaacttcttcgccatcaacaacgtccatcatgagatccttggctttaccatcaacccggtcagcttccaggcgctgaatcccttctgggtagtggtcgccagcccggtgctggcggcgatctacacccatctcggtcataagggtaaagacctgaccatgccggtgaaatttaccctcgggatgttcctctgcgcgctgggctttctcaccgccgcggcggccgggatgtggttcgccgacgcccaggggttaacctcgccgtggtttattgtgctggtttatctgttccagagtctgggcgaactgttaatcagcgctctggggctggcgatggttgccgcactggtgccgcagcatctgatgggctttattctggggatgtggtttctgacccaggccgccgcgttcctgctgggcggctatgtggcgacctttaccgcggtgccggcaaacatcaccgatccgctgcagaccttgccggtctataccaatgtgttcagtaaaattggcctggtgacgctgggcgtcacggtggtgatggcgctgatggtgccgtggctgaaccggatgattaataccccggccagcgccgagtaaccgtttaagatggccgatccgcactggcgccgtttgtttaaatattgcggttcccggctcgcgctacaatttggtagcccggataaggcgcgttgcgccgctatccgggagttaccaccacggcgtaatattactccggcgtaccggcgtaaatatcaaaccgatgccctttggtcaccaccgcattcggcgtggcgacatccgccagcggcggcgcataatccgggcgcttgaccaccactcgtttggtcgccaactgacgcgctggcgccaacagaccatcggcgtctaaatccggccccaccagcgactgaaagacgcgcatctctttcttcaccagcgcgcttttctgcttatgcgggaacatcggatcgaggtacaccacctgcgggcgcggggtgatatcggttaacgccgtcaggctggaggcgtggatcagctgcagccgctcctgcagccagccgccgatttccgcgtcagcatagccgcgcgccaggccatcatcgagcagcgcggcgaccaccggattacgctccagcatccgcacgcgacagccgaccgacgccagcacaaaggcatcgcgtcccagcccggccgtcgcatcgacgacatccggcaggtaatcgcctttaatacccaccgctttagccaccgcttcgccgcggccgccgccaaacttgcgccggtgggccatcgccccgccgacgaaatcgacgaagatgccgccaagcttgggctcatcgcgcttgcgtagctccagatgctccgtcgtcagcgccagcgccatcgggttatcgtcatcctgctccagcccccagcgggcggctaaaacagataaggcgccgtcaccggcgcctgtttcatcaattaagcagatcttcacgtagcaatcagcctttgatcccgtaatgctccagcatcgcgtccagctgcggctcgcgcccgcggaagcgtttgaacagctccatcggctcttcggaaccgccgcggctcaggatattgtcgaggaacgactgaccggtttcacggttgaaaatcccctcttcttcgaagcgtgagaaggcgtctgccgccagcacgtcggcccacaggtagctgtagtaacctgccgcatagccgccagcgaagatgtggctgaaggcgtgcgggaagcggccccaggtcggccccggcaccacggcgacctgctttttaatctcggccagggtctcaaggattttcgctccctgctccggtttgtactccgcatgcaggcggaaatcgaacaggccgaactccagctggcgcagaataaacatcgccgcctggtagtttttcgccgccagcattttctccagcagctcctgcggcagcggttcaccggtttcataatggccggagataaacgccagcgcttccggctcccagcaccagttctccataaactggctcggcagctcgaccgcatcccacggcaccccgctgatgccggaaaccccggcggtgtcgatgcgggtcagcatatggtgcagaccgtggccgaactcgtggaacagggtgatcacttcgtcatgggtgaacagcgccggcttgccgttgaccgggcggttgaagttacaggtcaggtaggcgaccggcttctgcagggaaccatccagtttacgcatctggccgacgcagtcgtccatccacgcccccccgcgcttatgctcgcgggcatacaggtcgagatagaagctgccgcgcagctcgttgtgttcgtcatacagctcgaagaagcgcacttccggatgccacacatcgacatcggtacgctctttagcggtaataccgtaaatgcgcttaaccacttcaaacaggccgctaacggctttgttttccgggaaataggggcgcagctgctcatcactgatgctgtagaggtgctgcttctgtttttcgctgtagtaggcaatgtcccacggctgcagctcatcgacgccaaactcggctttggcgaaggcgcgcagctgggccagctctttttcgccctgcggacgggcgcgttttgccaggtcggtgaggaaatcgagcacctgctgcggatccttcgccattttggtggcgagggatttatacgcatagctgtcaaagcccaacagctgcgccagctcgtgacgcagggcgaggatctccgccatcaccgggctgttatcccatttcccggcgttcgggccctgatcggaggcgcgggtggaataggcgcgatacatctcttcgcgcagcgcctggttatcgcagtaggtcatcaccggcagatagctcggaatatccagggtcaacagatacccttcctgctctttggcctgcgcctgagcctgagcggcggccagcgcgctttccggcatgccggccagatcggcgacatcggtcaccagcttgttccagcccatggtggcgtcgaggacgttgttgctgtactggttgcccagctcagagaggcgcgcggcgatttcaccgtagcgtttctgcgcctccggcggcaggccaatcccggataattcaaaatcgcgcagcgcgttatcaaccgcttttttctgcgcggtattcagcgtggcgtagttatcgccatcgcgcaggtcgcgataggctttatacaggccttcatgctggccgacccaggtgctgtactcggagagcagcggcagcgtctgttcgtaggcctcacgcagttcagggctgtttttaaccgaattcagatggctgacaggcgagaagatgcgtcccagcacatcgtccacttccgccagcggctggcaaagattttcccagctatacggcgcgccatgcgccaccgcgctttccaccgcggcccggcaatcctccagcgctttggtgaccgcagggaccacgtgctctggtttgatcgcagaaaaaggcggcagggagaaaggcgtcaataatggattggtcatatgcgctgtcctgttgaaaagggtgaatgaagcgcgcgtccggcgcttatgcatgagatctagaatgggggatagttgggggaatttcaatgacgggcggtgcgtcagcctgggtattgctgcgataagtccgcccgttgccggaaaagcgcgacacgcagtgcagcgtgccggaaaccacattactgccttttttgcgccatctcccaggccgccgacagattcaaccgctgccagaattgctgttcgggggtggcgccggatagcgggtaacccgccggcagcgcggtgttgaccatcaacgttcgacgctgagccgctgacagatgcggcagggcatcttccagcagcacttccgccccctccggcacctgtaaacgcggctgcggacccttctgctgcggcagatcgtaggtcatggtgaagcgagagaaatcacgcatcgccggatcgcgccagggatcgtctttcacgctgctcttcgcgcactcggcaagcgatgtgccgcaggccttcgccagcgcggcgcgcagctgatcgcgggcttcgttaaataatacccggtagtgcggatcgttaagatagtgggccacgttgcgctcggccaccattcgcgagccgatcacgtccagcgggtagtggacgcccagcacgatgcgcgagtagccatagcgggcgccgcgcgccaccagcgcgtcgtagcgctccgggatcatcgccgccagcagcagcgcatcggtatagccggtgttggtgtggccgctggggaacgagccgccgtcggcggtgtagggctggttatctttcaccaccacatcgtcaggcaccaggtgaatggtgttgccctgcaccagaaacggccgcggattgttgaagtgctttttcgcctcgccggtgctgacctccgaggctttgatcaacgctgccgctttccccagcgcgccctggtcataggcggtcagaaacgctttgccaagacgtggccccagcgcgtcgctgaggaagtagaggtagctaatgccttccgcatcggccagcgcctgacggcgcgtggtttgcacggcgtcgcgattgatggcggtcactgtcgccagattctgcttcacgacggtctccggcagggtgctgaacgccgacagcagcgcaatgcccgcctgctggttggcccgggtctggaagtcatagccgctggccttcagccaggcggtatcggcctgagtttggttttgtttggtgtgcgccagccgatcgcgggtcagcgtggcggcattcccctgcagagcgtggcgtagctgcgccagcgcctgttgctcaagatcgtcatacgcctggctggaggcagccggcgtcacgctattggcgagggccgccgccctgttcagcgggatgtctttagccagaaccggttgcgccagcagcagcgcgacggccagcagcgagagttgccttttcattatttttccttttattcaaataattaccttgcctgtatccgacgctagcgcggccgtttgacgtttttatgacagcgttatgttttgcaacgcttttggcagaaatgaaacagcgcggcggcgcagcggtaatctcggccgatctgcggtagactatcggttaacttgtttacttcccggaatctctgcatccatgctcagttatcgccacagctttcacgcaggcaaccacgccgacgtcctcaaacacaccgttcagagcctgatcattgaatcactgaaagagaaagaaaaaccgtttctctacctggacactcacgccggcgcgggccgctatcagctgagcggcgagcacgccgaacgtaccggcgagtatcttgaaggcatcgcccgcatctggcagcaggacgacctgccggcagagctggagccgtatatttcggtcgtcgaacacttcaaccgtaacggccagctgcgctactacccgggctcgccgctgattgcccgccagctgctgcgcgagcaggacagcctgcagatgaccgagctgcacccgagcgacttcccgctgctgcgcgctgaattccagaaagacagccgcgcgcgcgtcgataaagccgatggctaccagcagctgaaagccaagctgccgccggtatcgcgccgcggtttgattctgatcgacccgccgtacgaaattaaaaccgactatcaggcggtggtcaccgggattaacgaaggctacaaacgcttcgccaccggcacctacgccctgtggtacccggtggtgctgcgcgcgcaaatcaaacgcatgatcaaagagttagaagccaccggcattcgcaaaatcctgcagattgagctggcggtgcgtccggacagcgaccagcgcggcatgaccgcctccgggatgatcgtcatcaacccgccgtggaagctggagcagcagatgaataacgtgctgccgtggctgcacagcaaactggttccgaccggcaccggccacgccaccgtcagctggatcgtaccggagtaatcgcaaccatcggtggaaccttttaagcctcgcgctacaatcgcggcaatcaacgattaaggacatatgggcatgagcaaacattatgattacctcgccatcggcggcggtagcggcggtatcgcctcaattaaccgcgcggccatgtacggccagaagtgcgcgctgattgaagccaaagagctgggcggcacctgcgtcaacgtcggctgcgtgccgaaaaaggtgatgtggcatgcggcgcagatccgcgaagcgattcatctttacggcccggactacggtttcgataccaccatcaaccattttgactgggagaagctggtcgccagccgtagcgcctatatcgaccgtattcatacctcttacgacaacgtactgggtaagaataaagtcgacgtgatcaaaggcttcgcgcgctttgtcgatgcccacaccgtggaagtcaacggcgagatcatcaccgctgaccatatcctgatcgccaccggcggccggccgagccacccggatattccgggcgtcgaatacggtattgattccgacggtttcttcgaactgccggcgctgccgaagcgcgtggcggtggtcggcgcaggctatatcgccgttgagctggcgggggtgattaacggcctcggcgccgaaacccacctgttcgtgcgcaaacacgcgccgctgcgcagcttcgatccgctgatcgttgagaccctggtggaagtgatgaacgccgaaggcccgcagctgcataccaatgcgatcccgaaagcggtggtgaagaatgccgacggcagcctgacgctggagctggaagatggccgcagccagaccgttgactgcctgatctgggcgattggccgcgaaccggcgaccgacaacttcaatctggcggcaacgggcgttaaaaccaacgataaagggtacatcatcgttgataaattccagaacaccaacgtgccgggcatctacgcggtgggcgataataccggcgccgttgagctgacgccggtcgccgtggccgcaggccgtcgtctctccgaacgcctgtttaacaacaaaccggaagagcatctggactacagcaacatcccgaccgtggtcttcagccatccgccaatcggcaccgtcggcttaaccgagccgcaggcgcgcgagcagtacggcgacgacgccgtgaaggtctacaaatcttccttcaccgcgatgtataccgccgtgacctctcaccgtcagccgtgccgcatgaagctggtgtgcgtcggcccggaagagaagattgtcgggatccacggcatcggcttcgggatggatgagatgctgcagggctttgcggtggccctgaagatgggcgccaccaaaaaagacttcgacaacaccgtcgccattcacccgacggcggcagaagagttcgtcaccatgcgctaagacgcgatcgccggatgataaaaagaagcccccaggggcttctttttttatgctcaggccacgccgttattgccatggcgcataaacgccgggcgctgattgagcgccatataccagcgctccacggctggcatctccggatgggcgaaaggggtcattttccagcgatgcaccgacagccccagcacgatatcggccagggtgaagcgctcgccggctatccacgccccggtacgctgcagctgcgcttcaacaatgcgcacgtagtgggtccaggcggcaatactctctttaatcgccaccggatcctgaaagcgcggatctttacgcaccagccccataaaagcatggcgccaggcagtattgaactcggtcgcctgccagtccatccagtgctccacctcggcggcgggctgcggctcggcgggcagcagatcccagcgctccgctttgcgcgccagatagcggcagatactgttcgactcccagagcacgaagtcatcgtccagtagcaccggcaccaggctgttaggattcagacgctgaaactcaggcgtatccaggggcttaaatccgctgccgtaatcttcctgctggtacgccagcccggcttcctcgcaggtccacaacactttccgtacattgattgaagagcgtttacccagaattgttagcatcgtcagcgattcctcagccataaaagacagttcattcactctactctattgccagccagcaacaaggcagagcgctggataatgtgtatagttgattccagcctgtttgccgaaaaggaacccgacatgttgaccccttttaccgttttgatgcctgcaaatattcgttttggccgtggtcaggccgagagcgccgccccctggctggcgcaacagggcggcccaattctgctggtgcatggcgccagcccgcagcgggcggcgtttctccgccagcagctggaggcgctgcagcttgcggtcacgacgctggcgataagtcgcgaaccctggcttagcgatatcgagcagggcgtccagctggcgcgcgagaaagggatcagagcggtggtcagcctcggcggcggcgcggtgattgacgccggtaaggcgattgcggcgctggtccccgccgccggcccggtgatcgactatctggaggtggtgggaacgggccgtcagctggaagccagtcccctgccgttcgtggcgatccccaccaccgctggcacgggcgcggaggtcaccaaaaatgcggtgatcaacgttccggaacagcagcggaaagtgagcctgcgcgacgaccgaatgctgcctgacctggcgattgtcgacccggcgctaaccgacaacgcgccgcggagcatcaccctgagctccggcctcgacgccctgacccaggtgatcgagccctggctctgcagccgggccactcccttcaccgatgctctctgccagcaggcgatcccgcggggaattcgcgcgctaaaaatcctgatggaacaagagtgtccggccagccgcgacgagatggcctgggtcagcctgtgcggcggactggcgctggcgaacgccgggctgggggtgatccacggcctcgccggcccgctgggcggcctgagccgcgcctcgcacggcgccctatgcggcagtttgttgccgtttggcctggcgctcaatgagtcgcagatcaacgaccctggcctgcgccagcgcgttaacgatgtccgccgctggctggccgacgggctggacgtccctgtggatcaggtctgggacagtctgcgggaatggagccatcgcgctggccttggcaccctgcgcgacctcggcgtagcgcgcgatgcgctggaaccggcggcgctggccgccagcacctcctcatcgatgaaggccaacccggtcagcctgagcggcgaacagctgctggagatgctggaggcggcgtgggagtgagcgccccgggataaaattttgttgcataatgaatgctccgaatttcatctgcgccaggatgtacaatttttaattacttatcaacagcgtactttgaaatggcagcttttcttctcggcggaaaagcgtgatctcacgcacagtttgcttcacactcaccgaagcgactgtctacgcttaatagacaaggccgggtatgcccggccccgaactcacgctatccggaggtccgtatcgctatgttcagccagaaattacgccacgttgaagacgacgagttaaggatcgacatcgatccctgctacgaagccgatccgtacgaattaaagctggatgagatgatagacgctgaaccggagcctgaggtgatcgaggggcttccggcgtccgatgccctcaccccggcggatcgctatcttgagctgtttaccaacgtgcagaaatcacgcattttcgcggacagcaaaaccttccccgactgcgcgccgaaacacgatccgctggacatcctgcggaactaccgcaaggtcaaacgccagcccgacttcgatctgcggcagttcgttgaggacaacttctggctgccggagagccagagcgacatctatatctccgaccccagcctgaccctgaaagaacacatcgacaagctgtggccggtgctgacccgcgagcctcaggatcatatcccgtggtcatcgctactggcgctgccgcaggcctacatcgtgcccggcggtcgctttagcgaaacctattactgggactcttatttcaccatgctggggctggcggagagcggccgggaagatttgctgaaatgcatggccgataactttgcctggctgattgaaacctacggccacattccgaacggcaaccgcacctactacctcagccgctcgcagccgccggtgttcgccctgatggtcgaactctttgaagaggatggcgtgcgcggcgcgaagcgctatctggaccatctgaagatggagcacgccttctggatggacggcgccgagtcgttgatcccgcaccaggcgtatcgccacgtggtgcgtatgccggatggctccctgctcaatcgctactgggacgaccgtgacacgccgcgggatgagtcgtggcgcgaagacgtggagaccgcccgacactccgggcggcccgccaatgaagtgtaccgcgacctgcgggcgggcgccgcgtccggctgggactactccagccgctggctgcgggatatcacgcggctggccagcatccgcacgacgcagtttatccccatcgacctgaacgccttcctgttcaagctggagacgaccattgccaacctctccggcctgaagggcgatcgcgagacggaggcggccttccgccagaaggcccaggatcggcgggcggcggtcaaccgctatctgtgggatgatgagaacggctgtttccgcgattatgactggcgccgtgaacagctggcgctgttttccgcagccagtatcgtcaccctttacgtcggcctggcgacccacgaacaggcagaacgccttgccgatgcggtgcgggcccgcctgctcacccccggggggatcatggccaccgaatacgaaagcggtgagcagtgggataaacccaacggctgggcgccgctgcagtggatggcgatccagggatttaaacgttacggccaggatccgctgggagatgagattgcctggagctggctgcagacggtcaaccacttttacaagcagcatcacaagctgattgaaaaataccatattgccaccggcgtcccccatgagggcggcggcggggagtatcccctgcaggatggctttggctggaccaacggcgtggtgcgccgactgattggcctgtacggtgagccaacctagtcgggctgttcccggcggctttctcctgctatgttcagaggattcgccctgcccggaacgacgcttatgcctgaacttctgacgccgcgcctgcgctgctcaccgctgcagctggacgactggtcgttttttctttccctgcagcaggatccgcaggtcatgctctacgtcgccgatccccgaccgcaggcggccatccgcgaggcgttcgattcgcggctgccgccgtggacgcccggggatgaacactggctgtgcctggtggtgcgcgacaggctgacccataccccgctcggcctgaccggctaccagcatcatcagcgtgacattgccgaggttggctttctcttcgccccggcggcgcagggtcggggctacggctacgaatcgctgcgcgcgctgtgcgactacgcctttaccaccggcggcgtccgccgcctgaccgccagcgtcaccgccggcaacgaggcgtctaagcagttactgctcaaagccggcttccggctggagggagagctgcgggaaaactactggctcaacggacgctggcacaacgactggctgttcggtcggctgcgtggggagggcgatgcgccgtagcgcaccgccggtcacaggctgggggcagtcaggatcagaggaacatcccgcccgagacttccacacgctgcgcgttcatccacgccagctcatcgctgagcagggcggcgatggcgtcgccgatatcatccggcagcccaacgcgccccagcgcagtctgggcggcgatatgccgattcacctcggcgttatcgcgcacctccccgccgccaaagtcggtctcaatggcacccggcgcaatgatgttcaccgatatcccccgtccgcccagctctttcgcctgatagcgggtcagaacctccatcgcccccttcatcgcggcgtaggccgcatagcccggcagggcaaagcgcgccaggccgctggagacattaaggatacgccccccatcctgcaggagaggcagcagacgctgggtcaggaaaaacggccctttgaactggatattcatcagctcgtcaaactgcgcttcgctggtctcggcgaagggcgcattgaggccgatcccggcattgttcagtaaataatcaaaggtagtgcgtccccacttctgcgccagcacctgcgccacctcgctggcgaatgcgtcgaatgttgtggaatcgccgacgttcagcgctaatgctgccgctttgaccccttttttctctatttccgccaccacgtcgagggccgcctggcggttgctgtgataggtcaaaagaatatcggttccctttgccgccagcttcaacgcggcgtttttacccagaccgcggctgccgccggtcactaaagcgatacgttgtgtcatcagaagacccctttcaggttgcgttgtgattgtgttgtagcttattaactgctcatgcaacaataaatacgctacattgcgttttactgtttcattaacaacaacaataggcgatcggcatggataaaattcatgcaatgcagttattcattcgcgtagcggatctggagagcttctcccgcgccgccgagaccctggcgctacctaagggtagcgtctcgcgacagattcaggccctggaaagccatcttggcgtgcggctcctgcaccgcaccacccgccgggtccagctcacccaggatgggatggtctactacgagcgggcgaaagatctgctgagcaacctcgacgaactggacggcatgttccagcacgatccggcgagcatcagcggccggctgcgggtggatatgccggtcggttttgctaaaaaaatggtgatcccgcatctgccgacttttttacagcagtatccgggcatcgaactggagctgagcagcagcgatcggctggtggacgtgatccgcgaggggtttgactgcgtggtgcgcgtcggcgcgctcaaagactcagggctgattgcccgcccgctgggcaagctgacgcaaattaactgcgccagcccggactacctggcgcgttttggctatccgcaatccctggaggatctggcggatcatgccctgatccactacgccagcaccctcggggtccgtccccccggctttgaggtaatgatcgacggcgcggtgcgctgggtaaaaaccggcggcatattgacggtcaacagtacggaaacctatcaggcagcctgtatcgccgggctggggattattcaggtgccacgcaccggcgtgcgcgaggcgttacgcgccggcgacctgattgagatcctgccccagtaccgcgccgagccgctgccggtctcgctgatctacccgcaccggcgcaatctctcccgccgggtaaatctgtttatggagtggctgggcggactgatgaaagcgtatgtcgattgagcggcgcggccggaaaacgggcggcggggagaggcattcctgcaggatacggcatttaaggtatactttttgctgaatctcgctgtaaaaaaggaagaaattacgtatgacgccggaaaacgacgatcgacgcccgccacaggaaccggatacgcagccggagaaaagcaaaagcacgctcgaggcccttaatgacaccgccgtcgggcaaaaagccagccaggcgctgaagaccgtcaccggaacggcggccaaagtgcagcgcaacccggtgatcgctcatctgttgcgcgccgcagagcgcttcaatgaccggctcggcaatcagtttggggcggctatcacctatttctcgttcctgtcgatgatcccgatcctgatggtctcctttgccgccgccggcttcgtgctggcctggcacccaaccctgctgcaggacattttcgacaaaattctgcaaaacgtcagcgacccaacgctggcggcaacgttgaaaaacaccatcaacaccgcggtgcaacagcgcaccgccgtcggtctggtcggcctgctggtcgccctctattccggtattaactggatgggcaacctgcgcgaagcgatccgcgctcaatcgcgcgacgtctgggagcgccggccgcaggacgaggagaaaatctgggtaaagtacttccgcgatcttatctcgctgatcggtctgctggtggcgctgattattacgctgtcgatcacctccgtcgccggctccgcccagcagatgattatctccgcgctgtatctcgacaacattgaatggctgaaacccgcctggcggctaatcggcctcgccatctcgatttttgccaactatctgctctttttctggattttctggcgcctgccgcgccatcgtccgcggcgcaaggccctgtttcgcggcacgcttatcgcggcgattggctttgaaatcataaaaatcgtcatgacctggacgctgccggcgctggtgaaatccccctccggggcggcgttcggatcggtgctggggctgatggcctttttctatttcttcgcccgcctgacgctattctgcgccgcatggatcgccaccgcggagtataaagacgaccggcggatgccgggcaaaacccaccgctgaggtattgcgaggatgaataaaagaggcaaaattcatcctcgcgcttgatttcagcagataaatccagcatgtaacttttatttaactcaaaactggttttattctctatctttttaattgcgtgaagcatttcatagaactatttttactggtgtaaaaattatccgctttttgcctcttttttgcccattttccgcgtttgttacagattgaaatgtccctgtggctgtggctatatggcttttcgttcgcgcaaaaataagaaagatctatgcaagccacagccaccactctcgaaaacacgcaggaaaccgccccggtcaactcacgcaacaaggttgttgtcgcctcgctcattggcaccgccattgagtttttcgacttctacatctatgccaccgccgcggtcatcgtcttcccgcatatctttttcccgcagggcgatgccgctgcggccaccctgcagtcgctggccaccttcgccatcgccttcgtcgcccggccgatcggctccgcgctgtttggccacttcggcgatcgcgtcggccggaaggtcaccctcgtggcctcgctgttaaccatggggatctccaccgtggtgatcggcctgctgcccggctatgaaagcattggcattgtcgcgccgatgctgctggcgctggcgcgtttcggtcagggccttggcctcggcggggaatggggcggcgcagcgctgctggctacggaaaacgccccggcgcgcaagcgcgccctgtacggctccttcccacagctgggcgcgccgatcggcttcttcttcgccaacggcaccttcctgctgctctcctggctgctgaccgaccagcagtttatggagtggggctggcgcgtgccgtttatcttctccgcggtgctggtgatcatcggtctgtatgttcgcgtctcgctgcatgagaccccggtcttcgccaaagtggcggcggcgaaaaaacaggtcaaaatcccgctgggtaccctgttgaccaaacacgtccgggtgacggtgctgggcaccttcatcatgctggccacttataccctgttctacatcatgaccgtctactcgatgaccttcagcaccggcgcggcgccgaatggcctgggtctgccgcgtaacgaagtgctgtggatgctgatgatggcggtgattggctttggcgtaatggtgcctgtcgccggcctgctggcggacgcttttggtcgtcgcaagagcatgattatcatcaccacgatgattattttgttcgccctgttcgcctttaaaccgctgctgggctccggcaatccgctgctggtcttcgccttcctgctgctgggcttaagcctgatgggattgacctttggcccgatgggcgcgctgctcccggagctgttccc

SEQ ID NO: 5328 - DNA, 27432 bp, Unknown
  gut microbiota DNA sequence
ccgtccctgaagcggaccgccgtcgtgacgggggcgggttctataattaaaacagcttcatctgcatgcaaggaaacacagggtgagaatcgccaccatcaccaactgggcctacgggatcaccgtcggcctgacgctggcatccggcagcgccatgctcatggcctccagcgccgaccgcgtcgaacgccaggcggtacagcagcgccaggtctttgataccctctccgacgaagtggaaaacgacgcctgggcgctgtctgacctcgcccggctatacgtggttaagccctcgccggagacgcttacgcagtatcagcaactgcagcagaccgacaaaagcattgagcagcggctggccggactgaaagataacggcgccagccgcgaggagctggcgctactccaagatggcctgcagattgccgctgaactgcagaatgaacagcaggccgccctggcgcatgtcgcccacggcgatgcgccagcggccatcgccgtgctgtacggcaatgcatacgagaccgagctggaacgtatgcagacgcagatcgatcgcttccgccagatgctcgaaaatcgcgccgccgtcgccattgaccaggccaccgatcgctcgcggatctggcgcaccctgtcggaaatcatggtcggcctgaccgcgctgatgtttttgttcgtcctcggctttattctcaaacgccgggtgctctacccggtggttcgcctgagcgacgtggtgcagcgtctcgcctcccaggactatgcggtggagacgccgcagttcactcaggtggatgagattggcgatatggcccaggccatccgcatttttcgcgagaacggcctggcccgccagcagctggagcggcagcgcgacgccgactgggcgatccgcgagctgctggcgcgtatgactcagcggctgcagggctgtgaaaccattgaggatgtgattaaggtggcggagcggtttgcgccgaatatcgccccgacgatccccggtaaactgtatgttctggataccgacccctggcagatgcgctgcgtagcgcagtggctgtcgcccgccggtgagacgacgcccttttctcccgacgactgctgggcgatacggcggggactcagccatccgccggtgcagggcgagcccgatatcacctgctatcatctgccggagaagcacgccggccagtcgctctgcgtaccgctcatcgcccagggcgaagccattggcctgctgaccttccagaacgtcaccgccggtgacgctccttcccgggcctatctcgagctgatggcggaagcgttgggcctggcgctggccaatcagcgtttgcgcagcgccctgctggaaaaagcgctgttcgattccctgaccggcctgcgtaaccgccatcatcttgacgaagcgctgcattcgcagatggcgctggcggtccatacccatactccgctgagctgtctgatgatcgacatcgatcattttaaaaccatcaatgatcgctatgaccatgaggctggggatctggtgattaagagcgttgcgaccattgtgcagcgcgcggtgcgcgatatcggcatggctttccgctacgggggcgaggagtttttagtgctgctccccgggattgacgaagccggggcgcaccagtgcgccagcgagatctacacccaggtgcgcaatatgacgctgcgcgatggtctgaccgagataggccaggtggatgtgtcgattggcatcgccagctacccgcagcacacccaaagcgatagtctgctgcgcgcggcggatgccgcgctgtaccgggcgaaagagctgggccgctcaaggattgtcagctttggccgcctgaagaccagctaaccgggactatcgctcagcggtattaagcagcgagataactttccttaccaccgccgaacgaatatggcggtggtaaaccatgctcagctcactctccgccagccgatcctggagatcgatatacaccacgttatcaaggcgtaaggcccgcgccgagagcggaaccaacgccactcccaccccggcggagaccaggctaatcatcgaggtaacgtcgttaatccgctgcgccacctgcggcgtaaagcccgcgacgcgacaggcatccataaaaacctgctccagtccggtgccctgcggatcgtcaagcgagatccagttgtcagtgcgcaatgaggccagattaagcgcgcccacgccggccagcggatgctgttgatagagcgccaggcagagcttttcacgtacaaacggcctgaccaccagcgcgtccggcggcgaggccagcggcgcacggatgatggcgatatccagacgcagatccaacagcgcttcgtagagcatttgcacatccccctgcaccagcgacagctcaatccccggccagtcggcgcgcagccggcgcaggagccccggcagtttactgtcgtacatcgcgctggagacataccccaaatgcagcctcccctgctcgccccgcgcggtgcgctgggcgtccagcaccgcctgatcggccatttccagcgccagccgcgtcttgtgtaaaaaggcctcgcccgcggcggtcagagtcagacggcggttagcgcgggaaaagagcaccacgcccaggcgctgctcaagctgcttaatctgctgactgagggcgggctgggcgatatgtaaccgctccgccgcccggtgcatatgcaactcttcggcaacgaccacaaaatggcgtaacgctcgcaaggacatggtcggactcctccctacaaattgataagaaaaagcttatcaataaagcataaatgatgcaattgataaccattagcctgcgaagcatactgtgcgcatcgatacgctaaggagaacatcatgaccgcaccgattcaggatctgcgcgacgccatcgcgctgctgcaacagcatgacaatcagtatctcgaaaccgatcatccggttgaccctaacgccgagctggccggtgtttatcgccatatcggcgcgggcggcaccgtgaagcgccccacccgcatcgggccggcgatgatgtttaacaatattaagggttatccacactcgcgcattctggtgggtatgcacgccagccgccagcgggccgcgctgctgctgggctgcgaagcctcgcagctggcccttgaagtgggtaaggcagtgaaaaaaccggtcgcgccggtggtcgtcccggccagcagcgccccctgccaggaacagatctttctggccgacgatccggattttgatttgcgcaccctgcttccggcgcccaccaacacccctatcgacgccggccccttcttctgcctgggcctggcgctggccagcgatcccgacgacgcctcgctgaccgacgtcaccatccaccgcttgtgcgtccagggccgggatgagctgtcgatgtttcttgccgccggccgccatatcgaagtgtttcgccagaaggccgagtccgccggcaaaccgctgccgataaccatcaatatgggtctcgatccggccatctatattggcgcctgcttcgaagcccctaccacgccgttcggctataacgagctgggcgtcgccggcgcgctgcgtcaacgtccggtggagctggttcagggcgtcagcgtcccggagaaagccatcgcccgcgccgagatcgttatcgaaggtgagctgttgcccggcgtgcgcgtcagagaagatcagcacaccaatagcggccacgcgatgccggaatttcctggctactgcggcggcgctaatccatcgctgccggtaatcaaagtcaaagcagtgaccatgcgaaacaatgcgattctgcagaccctggtgggaccgggggaagagcataccaccctcgccggcctgccaacggaagccagtatctggaatgccgtcgaggccgccattccgggctttttacaaaatgtctacgcccacaccgcgggtggcggtaagttcctcgggatcctgcaggtgaaaaaacgtcaacccgccgatgaaggccggcaggggcaggccgcgctgctggcgctggcgacctattccgagctaaaaaatattattctggttgatgaagatgtcgacatctttgacagcgacgatatcctgtgggcgatgaccacccgcatgcagggggacgtcagcattacgacaatccccggcattcgcggtcaccagctggatccgtcccagacgccggaatacagcccgtcgatccgtggaaatggcatcagctgcaagaccatttttgactgcacggtcccctgggcgctgaaatcgcactttgagcgcgcgccgtttgccgacgtcgatccgcgtccgtttgcaccggagtatttcgcccggctggaaaaaaaccagggtagcgcaaaataagcaatagccgccggtaaacggcggcatttttccatgccgcgcgatcctgagcggatggcgcaggcaggattaattgatcgcagcggcgagatcttttttcaccagctcgcgctgctcagaggtcagctcctggcttacgtcgaaatggcgatcggggcgttacgcatgggggtatttacagggaatgatccttcataaaaaagagaggcgcttatcactgcgctaataaagactatctgtagcaaagggggtatttaaaactggataataaaagaatagcaggtaaccgaaaccagcccccggtcgaccctcaaccgcaaagaaaaatatattcttccttccagtagcggccctgacctatgatgtccccggcagaagtgattaaccgtttttgcttttcggtttcgataccctcaacgatcacatggccggtcagggtatgaatagactgcaacagaccgggcaaagcggggtcgttttctttatcccagaagtaatccttatccactttgacgcaatcgaagcggaatctctccagcagcgggaaggaggttcgcccgcgaccaaaatcatccagccagaccggacaaagcgccgccagcgtgcttagcgccgtcagctcgcggccggcgataaactcatgaaaattctcatttatctccaaagcaatatgcttacacgagcgcagaaaatcgcagagatagcggtccgtcagaataaaatggcttaataaatcatcgatattgagcgagatcggcttattatcgaccagggaaaaatcaaatacggaaagcaactcgatttgtcgggtaaatagtgcaagcttatcgctttcggtaagcgtggagaaagaaaacgcgggcgctgaggcgttatttcgtgcgggtgctataatatctttagtgagcaattcccacgagtggcagctgccatcatcgctaatagcgggctccagtacgaagcgataggaggtatttttcgcgttttcttcaaccatttaaaaaataccaaaaataagaaagggttaaagcatgtcatatatttcccgccaacaaaaatagtttaaaatgatcgataagaaacattcgatagccaaaaactatcaacatataatttattgatcggtaaagtgaattaatataaattagccaccgctgtcgcatgcgtttagacaacaattaaaatattttttcaaaccagccagttacatgacgagccccatccagtcgtagccacattacgcttttccccggcggcaaaaaaaagcgtggtgtaataaaaatcaaaaatacaagccgccagttttcgtcctcatcgtatgccaaaagatgaataatctctgacccaacgcaaccgcttgccgataataaaaacgcggccccggtcaacgaaacgtcatactttaccgctaccttgctggcagaacaggcgcagcggataaagggcagtgaaaagaaaatacatggttccactggcgctaatgctcatcgccagcgcatggctggaaccggccccgcggcctgtcgccagagggctgtgcgtctggttcgacggggcaatggtcaactgtctgcagaggcaacggctgggcgaaaggttgccgactcactcgctggccaggcggtaaacgggcactcgtcgggtggtattgaacaaattgtcgctgacctccacctccgtcgtgacaatcgccataccggaccggcgcaactgcgcgatgtccgccgccactcgctgactgccgaaccagaacagggcgtcgagagcggtgaccggcaggccggcgttcagcgcctggcggagccgctcccgggccggctttatctcccgggcaatctgctggtacggggccgccgtcagcccggttgcatcgacgcgacgaatgcggtttgccaggcggtaatgaaaggcttccgggacagcctttaaatcctgtttcaaactatagacgcagccgtaacgtttgccgttgaaaacggcggctttacggctaagctgcaacgtctcgcgaacatcggcgattagctgcggcgcgcgcaccagcagcaggcgaaaaggcagctcgaagctggtgacatagtcgacgttcagtaacgcaatgcgcaggcgctcctctgccccggcccgcagctgacgacactccaggtatacttcgcgccactgctcccggagccgtggcgtctcaccggcttcggtaaactggtatttttcaatatcgtaatcaattctcccggccaccgcgcattcctttctgaatcagtccgcgggttatattatcatcctccgacgccgtcccctatgcccaacgccgctgtcgttgtcgattatttacgataaagataacgggtgatgatcacatcaagaacaaacagcaggaagataacgctgcttaaccataataagcctgcgaataaatcaagtaattgcatcgttgttccctcgccgttggccctaaaaaagacgctccatcaccataaagtagttaacaaccaccttaacagccacagaataaaattatttagcacgatgccatcccgagcccggacagattcattttattgtcattaatttgtcatcaaaaaatgtctatcatcaaccggcgccgcagggtcgtctctgccgtcatggtatggcggacaacgcgtcgccacgcggtttaacaacacggaataacctcgccctacctcattcttactgtcattgcataattttatatcaggcacgtttgtcatcctgctgaataatccgtaaaagcgccgtaagcaataaaacccctgcagattggtttaccatggagaaataagatgcctagcgaaaaagcccgcagccttgaccatttctatgaattactggcgacaggacaacacccgaagattgagctcgattttgatgtcgccgcggacgatttttttaaaatcgccaccgagtttggcgatattggcgcgaggatcacccgggttaacgaacgatttattattaagatcaagccaccgaaggcataaacacccggcccgagtcgttgcagcagatcaccggtttgtgcgcatccctctcggtcatccctgaccggacggcgcgacgcgccggcaaatcctcacctgccggcgcgaatcaggctcagtgatagccctcgctgccggagactttgccgcgaaagacgtagtagctccaggcggtatacatcaggatcaccgggataatgagcagcgcgcccggcagcataaatacctggctggacggcggcgcagcggcatcccacagagagatatgcggtgggataatgttcggccagacgctgatccccaacccgctgaagccgaggaaaatcaggcccagcgtcaggataaatgggcgggcatggctggcggggcgcgcgctcaggcgccagatccacaggctcagagccaacaccagaatcggcaccggcacgaaccagaagaaattgggcagcgtaaaccagcgttccgccacgtagcgccagcccaacggcgtccagacgctgaccaccgcgatcaccaccatcagcgccagcagtaccttgcgggtcagctcgcgcatccgctgctgcagcgcgccttcgcttttcataatcaaccacgtggtgcccagcagcagataggccaccaccagccccagaccgcagaacaaattgaaaggggtaagccagtccagcgtcgaaccggcgaagcggcggtcagccaccgcaaagccgttgataaacgcgccgacgacaatcccctggctgaaggtcgccaacagcgagccgccggcaaaggcatagtcccagaagatgcgatgcgagggaaccgctttaaaacgaaattcaaaggccacgccgcgaaaaatcaggccgatgagcatcgccgtcagcgggataaccagcgcatcggtgatcaccgcataggccagcggaaaggcgccgaacagccctgccccgccgagtaccagccaggtttcgttaccatcccagacgggggcgacgctgttgaccatcacatcgcgctcttcgccatcatgcaccacgctgaacagcatcccaatacctaaatcgaaaccatccatcacgatatacatcagcgtggcgaagacaatgatgacaaaccaaatcaccgagatatcgatgctcatgatgcgttctcctcatcacgcaccggctcagccgctgagagcggacgcgccggggtgcctgcggtttgcgaggtcagctccgtcaccggctgcggcccttttttgataagccggaaaatgtagtaataccccacgccaaacacggcgcagtaaaccacgataaataccagcaggctgatggccatctgcagggtgctgtgcaacgacaccgcatcccgcgtgcgcagcaacccgtatatcacccacggctggcggcccatctcggtggtcacccacccggcgaccagggcaatcagaccggcgggccccatacagagcgcaaaccactggaagggacgcgagtggtacagccgccgccgatagcgcagccaggcgctgcagatccctaaggcgatcatcaacacgcccatcccgaccatgatgcgaaacgaccagaagacggcgggcgaatagggtcggtcctctttcgggaagtctttcagggccggcacctgcttatgcaggctgtgggtaaggatcaggctaccgagagcggggatctcaagaccatagcgggtccgctcctgctccatgtccggcaggccaaacagcagcagcggcgtggcctcgccggggcgattttcccagtgcccttcgatggccgcgatcttcgccggctgatgctcaagggtgttaagaccatgcatatcccccaccaccgcctggatcggcgccaccagcagcgccatccacatcgccatcgacagcattttgcggatggccggcgagtcgttgccgcgcagaagatgccacgcggcagaggccccgacgaacatggcgctactgagaaacgcggctatcgccatatggaacaagcgatacggaaaagaggggttaaagataatcgccagccagtcctgcgggatgagatggccattttcgatgataaaaccctgcggcgtctgcatccagctattggaggcaaggatccagaaggtagaaaccaacgtgccaagcgccaccatgcaggtggtaaaaaaatgcagcgctggcggcactttattccagccaaacagcatcaccccgaggaatcccgcttcaaggaagaaggcggtcagcacttcgtacagcagcagcgggccggtaatactgccagcgaactgggaaaatccgctccagttggtgccgaactgataggacatgactaatccggagactacgcccatgccaaaattgacggcaaagattttcagccagaaattgtagagtgaacgccagacattatcccgggttcgcagccacatcccctcaagcaccacaaggtagctggcaaggccgatggtgatggccggaaagaggatatggaaggatacggtaaaggcgaattgcaatcgggccagatgaaacgcgtcgaattcaaacatattccacacccatcattgtgaatcgccccggccgcagccggggctcatgcgaacatcacttagccgatgatgaagtgttttgcttcccggcgccgagttcggcgccggtcaaaggatcgccctgcgggtcagactgcgttcgcttcagcatcgctttgcacagcgcttcctgctctggcgtcaggccgacagaagcactgccatctccgccgtctacgcccggctgtggatccttgacataatcgaagtgtttgtcactgttccagctgccgcgtacttctccaccttcagacatattgtagtaggtgttagcgtactcgctaatgggcggcagtttgcccggtggatagttgttgcgaatcgactgcagggccttctcaaaagagagctgatgcgccgcttcgcgggtcatcaggaaggccagcgcgtctttcacgccaggatcgtcggtcacgttgatcaggcgttcatagacgatcttcgccctcgcctccgccgcgacattcgaccgcaggtcggcggtgggttcgccgatagtatcaatgtaggccgccgtccacggcacgcccgccgagttggtcagcggggtaccgccgccgtacagcagggatgtaatatggctgtcattgccgttggcggtgagcgaacgatagagttccgcctcgctctcggtgccctccgccagggctcctttggcgcctttattcagcatgccgaccaaagtgccaatgatctccagatggctcaactcctctgtcgcgatatccatcagcatatctttgcggccgggatcgtcatcgcttaatccctgggtgaaataacgacacgcggcggccagctcgccctgagggccgccaaactgttcgagcagtaaattcgcgagccccggattcggttcagcaacgcgtacggtatactgcagttgtttcacatgacgaaacataggcctgcctcctgggttattttttcgcttctacgccgtcagcatctgaacgcaggagaaactgctccgtggtctgaggaatatgtttaatcagccagtcggccatttcccgctcttcctccaggatggcttcaatggctgggatggaggcggtatcgcccgctttttcagcggccgccagcagagaggtatagcaggcgatttcaaactgctcgaaaacgtacccgctgatcgagcctttgacgatttcatcggaaggaaacatcccgccgatggactggccgagagccgccattttactcatcgaatctttaatcaccgagcgcgaaatctcattgcggtcgaggatctcttccagcacggtaatttgccgtttggtctcgttaacatgctgttcgattctggcacggagatccggataattatcgatacggccagccattgattccagcatggactctgcctgtttttccatggcatgcgcatctcgtagccagtcatggtaatgttcaacgtgattcatcgtgatttcctcgtgtcagggagagtttatttttccgctttcttattaatattacctaccgccagatcggttaatttcacatcggtttgtttttcttcttccagggtttcggcaagcagtttggctgcttttttatagcccaactgctctgccagggtgaccagagtaccgtaactggcaatttcgtaatgctcgaccttttgcgcagcggcaattaatgcagcatcacgtacctcatttttttccgtgctctcaacgacttcattagcttcttcgattaatccttccatggccacgcatttcatgcgtttgattttcaggttggattcctgttcaataatctggtcgatacgttcgatctggccctgggtttcttcaagatgagcattgaacgccgcgctgagtttttcactggacgccgctctggctagtttagccagcccgcgggttaattgtttctctgcgctgtaggtatctgagagcaggtgaataaatacatcttcaatgcttttcatattcatagaaataccttctggagtcagaaaataactgcgagtctgtgacagactcgcaggagatactttcacttcagggtgcaaggaaaaggataatcaggaattatcggacttgcggccaccgccgtggctattctgtccgccttttttacccgcttcggacgcacgctgcggatcatttttaaagttcccgccgctgtgctgaccacctttacgacctgcttcagaagctttttcacggtcttcagcaaaattaccggaaccaccacgatgctctgccatatttcacctcatgtatatcggttatgtcagtacgatacgaaaatattccgtatcactcgtcgttcgatatttaaatctagcgggtaatgctggttagtcaaattattattccgttttttcgacaccttttagcagtaattcggaataattctacaagacaccttaaaaataaccagacggcaccttgccgctaactcactgtgttcagggaaataatgtatgcagatcacctctgcggcaaagaattatctataccggaggattactaccgttgggttatataacgaagcggcagcattgccctttgccagacggaaattcagaatttttcctggttttacggataaaaaaaagccgctggggaagcggctagcaaacaaaatggagcgaatatcatgcccgattaatactggcacacataagggcaataggcaaataactcgaacagaccagccgggaaataatcgaagcgtggaatatattcagctcctggaatatcacgcagttccattattagtactctacgctttattttttacgatgatttatcggtgacgatagcagccgttcaccaggccgaagaaccgcatgctgtcaacctttctctcgaggagaatattctatgaaagcactcacttatcacggcccgcatcatgtcagcgtcgacaccatgcctgacccggctcttgaggcagcggacgatattattctgcgcgtcaccgcgacagcgatttgcggttccgatctgcatctgtaccgcggaaagatccccggcacgcaccatggtgatattttcggccatgaatttatgggggaagtggtggaagccggttccgaggtcaccgcggtcagcaaaggcgaccgggtggttatcccgtttgtcatcgcctgcggagactgcttcttttgtcgcttgcagcagtatgccgcctgcgaaagcaccaatagcggccagggagcgacgctcaatcgaaaaggtatttcgccaccggcggcgctgtttggctatagcgatttgtacggcgggatcccgggcggccaggcggaatatgtacgggtccccaaagccaataccggaccgtttaaagtgccagacaccttacccgatgaaaaggtgctgtttctgtcagatattctgcccaccgcctggcaggcggttaaaaacgccgaggtcaaacccggcagtagcgtggctatttttggcgccggcccggtaggcctgctctgcgcctcctgcgccaggctcaatggcgcagaacagatatttatcatcgatcataacgattaccgactcgatttcgcgcaacaacgctatggcgcgatcccgataaactttgaccaccatgacgatcctgcgcagtggattatcgataacacgccgggccatcgcggcgtcgacgcggtgatcgacgccgtgggcttcgaggcgaaaggtagccttacggaaaccgtcctcagcaccctgaaaatcgaggggagcagcggaaaagccctgcgccagtgcatcgccgccgtgcgccgcggcggcatcgtcagcgtacccggggtttacgccggtttcatccacggctttatgtttggcgatgcctttgataaaggactgaccttcaggatgggacaaacccacgtccacgcctggctgccggatctgctggcgcttattgagcaagggctgcttaccccggaggagattgtcactcaccatatgccgctggaggaggccgcgcgcggctatcagatctttgagaaacgtgaagaggcgtgccgcaaagtgatcctcgtaccgggaatgcagcccgggaaagcgaccctctgagaaggcgattaccgcgcaaggaaattctcggcggaccgatcgcggcatgatataaacatagcgtgctttggcccgccgtcgctgatatagccgttcaccagaggagaagttgatgctcgagttacgtccgaattgcgaatgctgtgataaagatctgccgccagactcacccgaggcgtttatctgttcgttcgagtgcaccttttgccgggactgcatgacgacgcgactgaacggacattgcccgaactgcggcggcgaactggtgcggcgccctgtgcgtcccgaagaggcgctgcggcgccaccccgcctccaccctgcgccgccatgcacagtaggcgagacgcaggtctcccggctaaggtaaaaatccacgcccgaggagagcgcggagcctgaaggcgtgaccggtggcagacaacgtgctctttcgattatcgcccggcggcgcttcgctagtccgggcgagcgtttccgggttcatattctgcatgtcagtaaaacggctttcccgcccgtactgcccgtcggcgatcgctttcatcgatagccgcagccgtcagggtttatccccccacatcgcgatttcactaaaactcagccagccctgtgcgctcaggctgccgtatcgcatggctggcgttcttttttattcaccatcgcaataacgcctgggagcatttccgttgcaatcgttgatctcctgccaggcatatttcgctgcacaccgaagcttcctgctctgaccgtcagtagactgcagggaaattcaccatggagcagagttatgattgcggtactttttgaggccgacgccttaccacaagcacaggaaagatatcttcagctggcggccgggctgacgcctttgctttcagacacgccggggtttattgccatcgagcgctttcagagcctgagtacgcccggcaaaatactctcgttatcctggtgggaagatgaagcctcggtggccaactggcagcaaaatgagcggcatctggctgcccagcgcgaaggcaaagcatcgattttttcatactacagaatacgcgtcgcccgcgtgttccgggattacgcatcggatcggggagcacagtcggatgtatgacattcacgtgattctcagcaactcgccgggctcgcttggcgcaatgggtatggcgctgggtaacaacggcgtggggctcgaaggcggtggcgtattcaccacgcctgatgccggacatgcgcattttctggtggaagacggtgagaaagcccgcagggtgctgaccgaggccggctttacggtcagcaatgtatgccgtcctctgatacgaaagttacctcaggaacgtcctggggaactgggagacatcgcagacaccctggcccataatggtattaatattctggtacagtacagcgaccaccgtaaccggctcattctccttaccgatgatgacgcccgggcagcggaagtgaccaaaaaatgggccatactttctgaatgaatctcctgaaaccgcagcaagacattgagccagaggaggcgctggaaaccgctatggcgatggtggcctccgccctctctgactcgtcaagggtcagtattctctgcgcgctgatggacgggcgcgcatggacggcaaccgaactcagtacggtcgccgaggtgtccgcctccaccaccagcggccatcttgcccggctgctcagcaacgggctggtggtgtgtctcgcgcaggggcgccaccgctattaccgcctggcgggctcgcatattgccgggctgctggaaaacctgatgggcgtctctatgcaagcgcataaggcgcttctccccagcacgccggttaatcttcgctacgctcggacctgctacgatcatctggcgggcgagctggcggtcaatatttatgaatttatgctgagggaaaaatggctggcggcagatggcctggccctgacgtcagccggtaaaacccagcttgaacgccttggcgcagtgtttaacgcccgcccacggcgtaagccctgctgcccctgtctcgactggagcgaaagacgttttcatctgggaggcagcgccggctcggcgctaatgacgctgttcctgcaaaaaggatggataacccgcgcgccgggatatcgggaagtacaagtgacggatagcggcaaagcggcgctgtcccggctgtttaatctgaaagtgagcggatagcctgagtttaggctacagcacattttcgccgaacggccccggtttaagccggtcgggccatcagtatgacgcctggcgtgcaatccgttttcatgcgagctcttacggcaaatggatctctccctgtcatgaggtatatagctttgttgaacgttgcgctgcgggacattcgccatcgcctaatgcttcaagcgtccggcagattaattgtctgaaggcgaaaaaaaacgggagcccatcggctcccgcttttacttaatccaccaacgggattacatattcgcgataatcgcgtcgccaaactctgaacatttcagcagtttagcgccttccatcagacgttcgaagtcataggtcacggtcttggcggcgatagcgccttccatgcctttgacaatcaggtctgcggcttcgaaccactgcatgtggcgcagcagtagttaactaataacatcattacttattgatttaaaaagaaaaataggtatttttgatacgtggttaatgtttttagtctaagccctaacctattgaaattcattagtatattttcagttttgataaccggctttgagtctttctgctcatctggatagtgaattattagccaataatactcactccctgtgagtcgggttaaatatttccggtgttataactcatgatttgaaaagaaaataaaaaagcctcggaatccgaggcttgcattggaaccagcagcgccattatattatttaattactacctaccatgtaatgattgctcttttccaaaccatcttcccttttttttcttcttttgtatgcagaatcattttcataataaaatataaaataagagaaaacgctatgatagcaatatatgtcccgatgccgaaagacaccagaaacacaaccaagatcccaaagagcgctactagtaaagatgtgcagatagatatcaaattaattgtcttgcgtgcgtctcttgatacataacctttaatcttaaatgcatggcaactgtggcagtggtcctcattaattaaaattgcaccacaaaatggacatttatcatcttttgttgtcatttattttaaatctcaacataatagtaatcactcatccacaaccttccctggcaagcgcaatcaacaacagaatgtactttatttttttgttctattgtctcaactccctcaacaatcacgaaattgcagtatgatttgattttatttattattttaaagaattcgctctcactctgtatttcccagaagtaatctttatcaatttttatacattcaaaattaaacatatctataactgttaagcttgttaagccactcccaaaatcatccagccatactggacacaattttgaaagacactttaagtcaaccatacagcatttagtattgaattcatgaaaatgctcgttaatctcaaaagcaatgtttttttggttttttaagtaatcaccaatatatttatcgttcaaaatacaatcgctaataagactgtcaacattcaacgaaactggcttgaacttcaattctgatgcatcaagcttttcaattgtcaatatctgtttcttaaacacatcgattttttctttatcgcttaatgaagtgaaacaaaaaccactttcattagcaaagtaatcattgcagtccttttttttaacatttttcgtgagaatttcccaagaatgaatagaaccatcttttttaaaagatggttctaaaacaaatctacaggaatctatttccatactgttctttatcattaaaaaaacaccggaactaggaataatcctaatcgtgtcatattcagaaatcaaaggaaaatagtttaaaatgatcgataacgatcgaacaataggcgaaacctatcacatttcttaaattgatcgattattcaaatcaaatgacttaaaagggaaaaaaaagaaacatgatttcaatataaattttaataaaatcatattgttatggaatgacaatactttagtggcatgtataaaacgttagttgagaggggtctgtggttccgagggaatttatccgtattggcaatgccgataataaactatcttaaaaattatatgtataaaatcatgagaaaagtaatcatttcatcttcaattattcggcatgcaatatccattcttcccgttacgtttaacttcatatagcatttcatcagcctctttgatccactcgatgattgattctttattttctgcacaagaaataccgatactgacagtgcagtaaatatcgttgtgagaaggtaatgaaagatctttaatttttttctgaattatatgaaccatagctataacaagcttgctattactattattaacaataatagccaactcatcgccaccaaatcttgctggtacgtccttctcgccagcacactctcgtaatattgttgatatacgagataacaccgcatcacctacttcatggccataggtatcattaatttttttaaaattatcaacatcaatgagcataagataagaatgaattctctttttacgcgttgcacgaaaagcactttccattttttgctcaaaaaaacggcgatttggtagatctaagccaggatccatcaaagcctgtttttccagtaactcccttcttttcctcaactttatagataagtgccttgaaacaatactcagtactatgggataacaggtcgccaagggtaaagaaagcaatactgttcgggtactgaattctatagtatatctgaaatcatttgctaaccaaactgtcaggaaactaatcatcatccacattaatgctggttttaaaattttccatccaccagcagcatagcgatcagctatttgaactgagattatgaataatgatggaattggactaacttgcattacagctatccagatcccagcccagaatgaatcaagtatcatattctttttttcagtacttagcatatccttcgacaccatgcttgcaagataagcaaccgatggccagattagtgcattcagaattaacaaggctattgttattttttgatgtgactgttcctggaggactgaatatataggaagaaagcaaagaacgacaccaatctgacgtaaaaaatatactcgcttaatgaacgatgaatttctatcagatatgtatttttcatccgggaaatttgttaacatagaaagcctattataaatcactaagagccgccatcactttaacccactaaataacaagataaaaccgccctgcattacaaagttataacacggatgtgaaaattacaagattgcacttcaattaatgataaacgtatcaataataacatttggcatccatttttttgaatctatcctcacgatttatatctgatgcatagtaatgccttaggattatattcttaaaaattaatttctattggaatttagcactactacattattaattttggtaggtcattaaaaaataacacaacatctgaccagtaaaactttacttgaacttacttatcgtttactgcaaattattctgtgatgtacacagcaattaatgtcgtttcagttgcccccggcaagtgcctccgggggactttttatgctcctcaactttctagtgcgtcaactcgcctaatcaaatcctgcacaactattaccaaatcggcgatgatcgccgtgtaatccacattcatcaccctgagtttttcgccatcaatcttctgctcgatgccgagaaaagtatacagttcgtcagctttttcagcctgctgagcgataaaaccgcgcctccggcgcgtttcgcctttcatattgaactcgcataccccgagcgcattaatgcgcctgcaggccccctcctggggttctgtaaatccgtctttcagacgaacgtcagaaccggtagtcatgacgtcgcctttgcctgtggtgatagtgccgcctggccgaaatagccaggcatctgttcggccatagccatcaagatagacaaccgccctatgctcttctcctacccgttcctcaatgtagtaatttgccactgccccgcgcgcatctccatatccactgcgtccctgtatcatcgactggaacggcgcaccggtgacaagctggccattagaaggtgcgctgggagcgatgttccgggccataattgctccccaggcgtatagatgctttttacacataaaggccccctcgagagtcagctcaccggctacgctctcgataagccgcgttgtgtaatcggcggtactaccgttgaaatgaaagtcgatgtatggcgtgctcatcgatagctcaatggcctgcgtcaacactttacccttcgacgtgttatcgatattgccgccggcagacagcgcgccaggcagtgtcgtttggttgttgccatcaataatgaggatgtcatcaaaggtatctgacggtgagacagtgctcgctcttgaacgctgaaccctgaacggtgttcccgagccaacggcaattgtcccgccttgcccctgttttttgagcagagccagatctgagttcttaccgagaataaaaccggcattatcgctggttataacctgcgagccgtcgagtttgtttcctccggtgagttttgccagcgcgttaagatctgatgccttcgccatcccggctatcgccggcacggtcacctgctttccggtgatcgggtcagtcagggtgatatcgccgctgccggtcagggccatcgaccagccctccaccacactacgccagaatacaaacgcgctggccagctggttagcaaacgacgaggtgctggcggtttcagcggtaataatgccgtaagaggcgccggaaaatgcggtggtgatattccgggtcagcgtcagttgcgtgtcgctgtccacggatttgatcgcatacaggtcagcactaccgctgcggtagaccaccagaatcgacccgggctgtatccccagggctacctgtgaccattttgttgtcgcacctgtcacccgtgcctgcgacgctgcccccgtgacggtgccgacttcatacatcgccataataaagttcctcctggatggttatcactggaaaaagaaaaggccccttacggggcctctgttagctaaatgaactgctgtccgtccgaaatgcagttgcggtgatgttctcgactgtgcaggtgtaatcaatcgcggcagtacgacctgtcgctttgataaagaagccgacattgttgtagtcagcatccaggcgcgcggcaaaccgcaattcaaaggccgtcgtgccggctgtgatattaccggcatcgacgaagatacggcgggttacctcctgcccaccaatgttgaacgtaatatcagaggtataccccaggccactgcccgtcccataggtctggcacaccagggtgcaggccagaaccactgtcatgctataccccctgttctgatacgcaccgttccgctgtaccgtctggttgcggcggaaggtcaggctgtcgtaacttttggccaccgcaatgtcaccgatgaacgcatccgcctggacagtgccacggaacacgccgctagtcgcttcgaccctgccacggacgatcacgttattgaactgcgaagagccatccttggcgatacgccagccgcgtgacccgtcaacaaagtcattcgagcggatctcgttgccgatcttcgcgttcgtgatggaaccgtccgcgattttggttgaggtcagggaactgtttttgatacgtgccgtatcgatatacagttcattgccttcggcaatcatcaccggcactgccgtcgcattgttacggttaaacagcgagaagcggtcggcgtagaggatcatgtcgctcgtttcaccattgctgcccagcgtaatccccgcgccaacattcttcccgttaaccgtctcaaccttcatcgaccacagcgaactcaccgtaccattcacatccgccacggttttagcggtgttctgaacggaagcgctgagatccccgacactggatgtcagggtcgtctgctgcgttgccagcgcctccagtgccgttgcatgcgtatgctgggtactggtgatactggccaccgatttaatcgtattgtcgagcgtcgtctggtttttgatgttggcggccgcctgcgcgtcaatctgcgactgaagcgaggtattcaggctggcctgtgtgctctggctgtcgctcagcgtcttcgccatgttatcgacgcgggagttggcgttatccactttcgtggccagtgccgtctgctgctgcgcctgggcagtgattttcccttcggcatccgttacgcgcaccgtcaggccgctcacagcgctcgccgtcgcgtcagaggcatcctgtgcctctttcgcatcggtaacatccgtgatgaccagatcgtcgatatacagtgaatagccaggggtaccgtagccggtggcgccacgggtggagatccagaccaccgcgcgtgttctgcctgccccgttgttactggcgatacccgtgaatttcacccatttatcgcgcgcgcccagagaagcttcgctgacagtgaccgccgcctgccaggcattttgcccggcagcattctgcgactggataccgaccagcgttctccacccggaggagggtgcctgatccgccggcatcatggcccagaactcaaaccggaacttcgcgtcctcacggactgactgccaggtgccaagctgtttatcgctgttgccgccgttgttctcatcccgtctcaacttcaggctcttatcgccggtgaatttctgagacgccaccacaacggcggtgccgttcccgcccagcacctggccatcgctgtagctttcaaacgtaccgtcaacccacggattagctccctgagtgcggatggtattgatggtgctggtcagcgacgtgatgctctgcgactggctggtgatggtgttttccacctggcttacgcgaccggtcagtgaactcaccgcggacgtgtcagcctttttacccagctcagtattcatcgtggtcaggctgttctgcaaactggtgagctgctgcgactgcgaatccagtttaccctcggcagacgtcatccgggtggtcaacccggtgacagcgctttgctcggccttcttactgaccgccgcattcgtgacggccagatcgccgctgagtttcgtcagctgctgcgcctgggtggtgatagccccttcagcagcggtgacgcgggtattcatctgagaaatggccccggcattagctgcgatatccttttcatccgtaacatcgaggacatggaaatcatcgaaatacattgcccccgcgctgaggaaggtcgtcagctggaaactggccgtcgtggtcttcgtggctttccagtcaaacgttaccagttgccagccagaactaaacggtccgtagtttgagccgaccagcaggccagtgctgtcagccacacgaaacttcgtgttacccgcatctttaatcgtggtccccggatcctgcttcgcccatacccccatgcggtaggtacgaccctgggtgatactgatttcctgtccgaccaggttagactggccggcggacattttcagtgccttgttacccgagtgcggaacctgtaaatcggccaccgtcgcggtactgctccagccggtaaagcccgccgcgccgcgctcaaaactgccgttgacaatgaggttacccggcattttcccgctggcgtcaatatccgctgccgtctggctcaggctgttactcagttgcgtcagagaatccccctgcgcactgagtgttttgccctgctccgtgacctcgttctgcagggtgttcatcgcgcttgcgtccgcttttttgtttacgttcgcattcgtcgtggccagatcgctgctgagtttagtcagcgcgctgttggccgccgcgatgtcattcccctgctgcgtcaccgtgccctgcagctgcgtcaccgctgtcgtgtcagcctttttactcaccgtatcgtttgtcgaccggaggctgttctccagcgaggtggtccgcgtgccgatgctgctgagcgtatcgccctgctggctaaccgtggtggtcagtgaatccaccgcttttgcggtcgcatctgcggttttctgcgcactgttcgccgccgtcacgttacgcatatgccagtcggcagcgtaccagatggtgccgaacgggctgctctgattaacctgcaggaatgggcgcaggaagttcgtgtcttccggcaccgtaaagcgccaggtggcacgcttccacgcagtggtggtcttagtattgcccccggaagttctcgccttgatgccatcggtggcggtggtggcccgaccaatataaaaattaaagtcggcgctgccggcaccacacgctaccagagcagacatttcaaaaacgtcgcccggtgtcacggcgatattgttgatttttggcacatggtctcgcccggccaaccgaatagcatacgtgaacgggcaatcagccggcacacctgcagcagtggtctccaccacgtcataacccatgcggtcatacgccggatcaaatgacgggtttggaatgtaatcatccccggcagcattcccggcgttcaccgctgccgtcaggctgacgatgttgctgttggctgccgtgaggcctgcctcggttttctccacccggccagtcagcgcgttaagcgccgtctgatccgctttggtgttgaccttatcggtagtgctgctcaaatcgccctgcagcttcgtgatagcctgcccctgggaggtgatcttcccttctgcactggtgacccggttagtgaggtcacttaccgactgcgcgctggccttttgtgatacaccattcgaggaaaacagcgttacgttacggatcaacaagcgagctgttgatggtgtcagtgtcccagcggccagtctcagatacacgtaattaccgataaaagtagccggaatgttcagggtaaaagttttggtctgccagtcggtggttacaccgctcaaccatttcgtggtagagctaagccagttcaccggatccgacaaatctgcaataacaccaaccgtatcggtagatacgtttgtcatcgtaaccgagcttcgcacctcaagactaagcgtcaagacggtccctgcctctacgggtactttcgtgatgtttgccgtccggatggaggctgtagttgtttgcaaagctttttcagcatcgttgtacgtaaatccagagccagtccccgaatctacccacagcgataaatctgattccattccaccattgccgatgagactgccggaagacagcgatcctttcagcatggtcaaaaggttaccttgtgatgtcagcattccttcactagcactgacacggtcactaagcatacttacggccgcactgtcggctttcttagccacattcccgttggtgatgctcaggctgttctgaagattcgtcagcgcgttgctttgcgcggtcaggtcttttccttgctgctcaacggtgttctgcaggctctgcagcgccgttgcatcagccttcttcgccacattgctgttagtcgtgttcaggctgttctgcaggctggtcaggctgtctccctgcgatttcagaccgccttcggtagccgtcacgcgggtcgtcagattcgtcagcgcgctggcatcggccttgccgctgatatccttaccaagttgcgtcacatccgactgcagtttcgtgatcgcgctgccctgagacgtaatattcttcccgttctgcgtgactgacgcggacagactggaaagcgcctgcgcattcgcatcggcggcatcgagcgccgctttcgcatcggtcacgtcagtgatgaccagatcatcaatcaggaaggcgtcacccaggcgaacttttggtgtattcgggatggagatcctcaccattgcctgtttcagcgcggttcggttgttggtcagatagccactgacttttgtccagttgtccaccgacaactcggagactttcacgttcaggccaggccacgaccagccattggcagaatcctggaaggaaaatccgagcaccatataaacggtcggatcggcggtcgagccagccggcaacttaacccacgcctccacgtaatagaccgcgttatcgcgaacctgcatgcccgaaaagatatgggtatcgttattatccgtcgcgttcgggttgtactccgtactgcgcgtaacacgcaggcttttggtcccgctgtgcgcagcttcactggtgataacggcgcgggcattactgagaacatcgccgacggcataggattcaaaactgccgtccggcagtacgttggctccccgtgtcgcctgctgcttcagtgatgtattcaggctggtcaggctgtcggcctggctacggatatccttttcagtctgggtaacccggttgatcagtgaactgaccgccgacgcatcagccttcttcgccacatcgcctttgaccccttccagcgcgttattcagcgccgtgatggattgcccctgtgatgtcagggtgttcccctggttcgtcaccgtcccggtcagagacgaaacagcatcgctggtcgccttgatgttggtttcatcggtgatatcaaacacccggacggaatcgagccagatttcaccgtttgtcggatgagaataaagtttgaagttctgcccgtccgcgccggcagccgtcaatccggtttcccaggtgatggtttgccagtcagtggtcagcgtgaccgttttatcctcatacgtactgtccgtctggccgattttgttctggcgacggatcagcagactcatcgcgccggaaacacctttggccttcaccaccacccgatacttgcgctggccattcagcggcaccggcttgttgttgttggagaaaatgcctgggctggtagtggtcgtccggttcagccggacccccactttcccgtccccgaaatcgccaaaggtcacaccggctggatactgaatatcccaggcagtgctgccctgcagaaaatcaaagttcgggatcaggttgtcgccggcgttgcgggtggccgtcagcacattcgccagatttgtcagctgctggctctgtgtggtcagtttcccttccgcctctgccacccggttatcgaccgaagtcagtgccgttgcatcggccttcttcgacacattgctgttggtcgtgttcaggctgttctgcaggttcgtcagctgctggctttgtgaggtgatg

SEQ ID NO: 5329 - DNA, 34313 bp, Unknown
  gut microbiota DNA sequence
gcctttcggcgccatttttatgcagcaagcattacttcttgatgcggattaccggggtttcacccacggtcacgctaccggacagtttgatcagctctttgatctcgtccatgttggagataaccaccggcgtcagagtcgacttggctttctcttccagcagcggcagatcaaattcgataaccggatcgccgactttcacgcgctgaccttcttccgcgatacgcttgaagccttcgcctttcagttcaacggtatcaataccgaagtgaacgaacagctcgatgccgctatcagattcaatagagaacgcgtggttggtttcgaaaattttaccaatggtaccgtctaccggcgcgaccattttgttgccagtcggtttgatggcaatcccatcgcccacaattttttccgcaaaaaccacatccggcacgtcttcaatgttgacgatctcaccggagaggggagcaacaatctcaatagttccggtgtctttcttgtcatcagaaaccagagatttcaatttatcaaacaaacccatgatcttctcctaagcagtaatttgggccgcgcatctcgtggattagcagattgttttttcttcaatgaacttgttaaccagcgtcattaactcgtccgttgtcggttgagcaagagcctgctctgctaatactttcgcatcttcgaagttcgtattacgaataatcttcttgatgcgcgggatggaaatggcgctcatagagaattcgtccagccccatacccagcaacagaagtgtagcacgttcatcgcccgcaagctcaccgcacatgccagtccatttaccttcagcgtgagaagcatcaataacttgcttaatcagattcagtacagacggtgacatcggctggtaaagatgtgaaatcatatcattaccacggtcaactgccagagtatattgcgttaaatcattggtgccgatactaaagaaatcaacttctttggccagatgacgagcaatagtcgccgcagccggtgtttccaccatcacgccgatctcaatggattcgtcaaatgctttaccttcgtcacgcagttcctgtttgtagatttcgatctctttcttcagcgcacgcacttcttcaacagagatgatcatcgggaacataatgcgcagcttaccgaaagcggaggcacgcaggatggcgcgaacctggtcgcgcaggatctctttacgatccatcgcaatacgcacggcacgccagccgaggaacgggttctcttctttcgggaagttcatgtacggcagctctttgtcgccgccgatatccatggtacggacgataacggcctgagagccacaggcctcagccaccgctttataagccgcaaactgttcttcttcagttggcagcgcgtcacggtccatgaacaggaattcggtacgatacaggcctacgccttcggcgccgttgcgctcagcaccttcgacatcgcgaacggtaccaatgttggcgcagacttcaacctgatggccgtcgagggtaatcgccggcagatctttcagtttcgccagttcggctttttcttccgcaacctgagcctgcagactacgcagcgcttcaatttgctcgttagacgggttgataagaacctggttgttcaccgcgtcgagaatcagatagtcgccgttcttcacctgcgccgtgatgctgccggtgcccacgatggccggcaattccagggaacgcgccatgatagaggtgtgggaggtacgaccgcccgcatcggtgatgaaacccagcacttttttcaggttcagctgtgcggtttcagacggggtcagatcggcggcgacgaggatgacttcatcctgaatcgcactcagatcgatgattgccagaccaaggatgttgcgcagcaggcgcttaccgatatcacgtacgtcagccgcacgttctttcaggtattcatcatccagctcttccagggcagtggcctgaccgtcgataacttcattggctgccgcgtcggcagtcatgtgcttatctttaatcagggctatgatttcctgctcaagctcctcatcttccagcagcataatatgcccttcgaagatggcttctttttcttcaccgaaagtttcaccagctttggttttgatgacctccagctgggcggaggccttggcgcggccgctcaggaaacgttcgacttcctgatcaaccttatcggcagaaattttcttccggtcgatgacaatttcatcttccttcagcagcaatgctttgccgaaggcgatacccggggatgctaaaatgcctgaaatcataaccctaccttacttgtgactgatatgaaaaagaacccgtgaacttactcgagttcagccatcagtttaaccagatgctcaacagctttctgctcatcttcgccttcagcggagagggtcactacggtgccctgggtcaggcccagagtctgcagtttgaacaggcttttggcgctggcgcttttgccgttggaggttacagtgatctcagaagtgaagcctttagcttctttaacaaactgagcagcagggcgggtgtgcagaccgttcggagcggtaatggtaacttcttgctggaacattatatttccccaacttataggtttagtgttgtggacctaaagtctagtctaacgactcgactttagcctgtattgttagcgccggcgttacgtttccggccttggcgtcggcagcgcctggcgctgcgaagacctgcgggccattgacgtctagcacgtcattaaacattatgccgcgaaaggaagacttgaaccaaatcataaaatcgattcagctggcggaaatcctcttctgaataatttcgcgcatcaaaataaatgtgctggttaaataccagaccctacgaggtgaatcaatgccaggaggggtaaaactttgacgtgtgccacaaaaaagcacccgaaaaggtgcttttttacacattatttacaagctggcactactgttgcagctctttctcagtgaagagatcggcgaacagcgcggtgcttaaataacgctcacctgaggaaggcaggataaccacaatattcttattggtaaaggcctcatcttcctgcagcttcagcgcggcggcaacggcggccccggaagagatacccgccaggatgccttcttcttccatcaggcggcgcgccgtggagatagcttcctcgttggtaatgccgatcactttgtcgaccagcttcagatccaggttgccaggaatgaagccggcgccgataccctgaattttgtgcggacccggcttgagttcttcccccgccagcgcctgggcgatcaccggggaatcggtcggttcaacggcgacggtgatcagatcttttttacctttggtgtttttgatatagcggctgacgccggtcagcgttccgccggtacctacgccggagataaacacatccacctgaccatcggtatcttcccagatttccgggccggtagtcttctcgtggatttccgggttagccgggttgctgaactgctgcagcagcaggaattgttccgggttgctggcgacaatctcttccgctttctggatagcgcctttcatgcctttggcgccttcggtcagcaccaggttggcgcccagggctttcagcagcttacgacgctcgatgctcatggtttccggcatggttagcgtcagtttgtagccgcgggccgccgccacgtaggcgagggcgataccggtgttgccgctggtcggctcgaccagttccacgccaggtttcagaacgccgcgcttttcagcatcccagatcatattggcgccgatacggcattttacgctaaagctcgggttacgagattctacctttgccaggatacggccattaccgatgcggttcagtcgtaccagcggcgtatgaccgatagtcagggagttgtcttcaaaaatcttactcatggcccgtccttaactgtatgaaatttgggggtacggcatcagcatacccgcttaaagaatatgcggaagtaaggatttagcatatctatatgcggaagggaaataatgataagcaagaaggaataagcgcgatataagggagcggcctttgccgcccccaagtgaaggtgttaccgctatttccagctggcgtgtctatcgcgatagcaatcgacccacatggcggtggcgccgcagatagccaccggaaggatcaccaggtttaacaccgggatcattgtgaacaggctggtgagcgccccaaactgcatattcatcactttgcgactgcgcagcgattcgcgcatggttttgaagggaaccttgtgattatcaaagggataatcacagtattgaatcgccagcatccatgcgctgaacaggaaccagagtaccggggctaccgtctgcccaacgccgggaataaagtagagcagcaacagcacgatggcgcgcggcagataccaggccagcttctgccactcacgcttcataatccgcggaatatctttcatgatgccaaagacgccgacgtccggcggggtagcgccggtcaggcgcgcttccagctgttccgccagcaggccgctgaacggcgcggctatccagttggcgatcgtcgaaaagaagtagccaaacaccagcaggattgagagcactaccaccggccacagcaggtagtttagccactgcagccagtccggcacatggctcatcagcgaggggatccagctgccgagacgggtaaacagccaccagaaggcagcgcccatcagcagcacgttaaccagtaaaggcaggaagacataacgccgtatgcccggcagcccgatgagtttccagccctgcgaaaaataataaacgccgctgcgcggggtcggtgcggatgatgaaaccatagccaggcattgctccttttttaacatccggtgtgaatgctcgcttattttatcgggtcgtcagacaataaccagttaggaaatgttcgaaaaaacagcaaaaagcacgatttagttcatctttatgtggtgaaagcgaccgacgcacttgcacttgaggtaatcggcaaatactcttagtgagtaaatgtttgccgtggtggcaaggtgttagaacaacagagaatataatgatgcaggatttgcgtctgatattaatcattgttggcgcgatcgccataatcgctttactggtacatggtttctggaccagccgtaaagaacgttcttcgatgtttcgcgatcgcccactgaaacgtatgaagtcgcgcgacgatgagtcggaaaacgacgactttgatgataatgttgaaggcgtaggagaagtccgcgttcatccggtgactcacgccccgcacggcgcgcatggggagcatgaagcccctcgtcagtcgccgcagcaccagtaccagccgccttacgagcgccagatgcagcagcctgcgcgtcctgaagaaccggttcgccagccgccgcagccgccgcgccaggccccggttccaccgcagcaacagcctgcgccgcatgcggctccgcagcctggctggcaacagccgcaacctgcgcagccgcccgtacaaccgcaacaccagccgcagcctgttgtgcagcagcctgtcgcgccgcaaccggtgacgccgaccgtcgctcagccgcagccagccgccccgcagcagcctgcgccacagcctgttgccgcgtcgcagcccgccgtcgcggaaccgcagccggtagagccgcagcagcccgccgcgccgcagccgaaagagcgcaaagagacggtcattgtgatgaacgtcgccgcgcatcatggcgcccagcttaacggtgaagtgctgatcaacagtatccagcaggccggctttaagtttggtgaaatgaatattttccaccgccacctaagtccggacggcagcggtccggtgttgttcagtctggccaacatggtgaaaccgggaaccttcaatccggacagcatggcggatatgatgacccctggggtgactatctttatgcaggtcccttcctacggcgatgaactgcagaacttcaagctgatgctgcagtctgcgcagtatatcgctgacgaagtgggcggcgtggtgcttgacgatcagcgtcgcatgatgacgccgcaaaaactgcgtgaataccaggatcgtattcgcgaagtgaaagacgcgaacgcctgacgttccgcgttaactcaatcctttctcaacccccgcctgtcgggggttttttatcattgatggtgtgatatggaaccaatcgaacaacaactgactgaactgcgaaccacgcttcgccatcatgaatatctgtaccacgttatggacgcgccggaagtgccggatgcggaatatgaccgcctgatgcgcaagctgcgcgagctggagagccagcacccggagctgattaccccggattcgccaactcagagggtgggggcggcgccactcaccgcctttagccagatccgccatgaagtgccgatgctgtcgctggataacgtgtttgacgaagagagctttctcgccttcaacaagcgggtacaggatcgcctgaaaagcacagatcatcttacctactgctgcgagcttaagctcgacggcctcgcggtgagcattctctacgaaaacggcgtgttggtgcaggcggcaacccgcggcgacggcaccactggcgaagatattacctctaacgtgcgaactattcgcgccatccccctcaagctgcatggcgagaatattcctgcacgccttgaggtacgtggggaagtgttcctcccgcaggccgggtttgaaaaaatcaatgaggaagctcgccgcaccggcgggaaagtgtttgctaacccgcgtaatgcggcagcgggttcgctgcgccagctcgatccgcgcatcactgcgaagcgaccgcttactttcttctgctacggcgtgggcgtgctggagggcggcgagctgccggccagccactcggctcggttgctgcagttcaaagcatgggggctgccggtgagcgatcgcgtcaccctgtgccacacccccgaggaagtgcttacttactatcgtaaagtcgaggaagagcgtccccacctgggctttgacattgatggcgtggtgatcaaagtcgattcgctggcgctgcaggaacagctgggtttcgtcgcccgcgcgccgcgctgggccgtggcctttaagttcccggcacaggagcagatgaccttcgtccgggacgtggagttccaggtgggccgcaccggggcgattacgccggtggcgcgtctggagccggtccatgttgccggcgtgttggtgagcaatgccaccctgcataatgccgatgaaattgaacgcttaggcttgaaaatcggcgacaaggtggtgattcgccgggcaggcgatgtgatcccgcaggtggttaacgtggtgctttccgagcgtccggcggatgcccgggatgtcgtcttcccgacccactgtcctgtatgtcagtcagacgttgaacgggtggaaggcgaggcggtagcccgctgtacgggcggcctgatctgcggcgcgcagcgcaaagagtcgctcaagcacttcgtctcccgtcgcgcgctcgacgttgacggcatgggcgacaagatcatcgaccagctggtggagaaagagtacgtccataccccggcggatctgttccggctgacggcggggaaactgaccgggctggatcggatggggccgaagtccgcgcaaaacgtagtcaacgccctcgagaaagccaaagagacgaccttcgcacgtttcctctacgccttaggtattcgcgaggtaggagaagcgacggcggcgggcctggcggcgcatttcggcactctcgaagcccttgagcaggctaccattgaggagctacagaaagtccctgatgtcggcatcgtcgtcgctacccataccttcaacttctttgccgaagagagcaaccgcgatgtcattgcgcaactgctggcggagggggttcgctggcctgcgccggtggtggtgaaggcggaagagattgatagcccgtttgcaggcaaaaccgtggtccttaccggcagcctcagccagctgtcgcgcgatgacgccaaagcgcgtctggtggcgctgggggcgaaggtggcaggcagcgtgtcgaagaaaaccgacctggtgattgccggcgaagcggcggggtctaagctggcgaaagcgcaggagctgggcatcgaggtgattgacgaggccgaaatgatgcgtctgctgggagaataacgtggataaagcgcagctggtcgagatagccaataccgaaatgccgttcggtaaatacaagggacgtcgcttaatcgatgtcccggaagagtatttattgtggttcgcgcgtaaggatcaattccctgccgggcatcttggcgagctgatggcgttgaccctgctgattaaaactgaggggctgagcgatctggtccagcccctgaagaaagcgcgttaggctttggccgcgttggccttttcctcagcgagacgcgcatcggtttgctgcttgtagcgccgcgccagcaccgcgcagaccatcagctggatttggtggaagatcatcaacggcagcaccatgatgccgaggatggaggtcgggaagagaatattggccatcggaatgccgttggccaggctctttttcgaaccgcagaagacgatggtaatctcatcggctttgttaaagccgcagcggcgggcgacaaagacgttgaccgcgatgacgatggccagcagcaccaggctgaccaccacgataaacagcagcgatcccagaccgactttatgccagatgccattcaccaccgcctcgctaaaggcggagtaaaccaccagcagaatcgaggtctggtcggtcttaccaatccacttcttatgcttcgccacccagtcgccaatccacggccgcgataagtgaccgagcacgaaaggcagcagcagctgcagcataattttaccgacctgctccagactgccgcctgcgccgtgaaggttcatcaggacccccaccagtagcggggaaacaaagatccccagcaggctggaggccgaggctgagcaaaccgcagccgcgacgttgcccccggccagcgaagtaaaggcgatagcggattgcacggtggccggcagaatgcacagatagataaagccgctgtagagcatcggatcgacattcaccggcgcccaccaggcaaacagaaccccgagtagcgggaagagaataaaggtgctgcacatcacccagagatgcaaacgccagtggctgccgccggcgataatcgcctcccgggagagtttagcgccatgcataaagaacagtagcgcgatggcggcggtggtcagatgttcaaagaaggggacgaaagcgccacgggccgggaagaatgaggccagcaggacaacggtgattagcgtggccgtaaacggatcgagaatacggaaaagtttcataaacgctcctgaaaagagatgcgctattgtgctttttttcatttgagaaataaaattgatttattgcatctattcatgaataaaaaagatgaattactctctgcgtcagttaaaagtatttgtcaccgtcgcccgggccagaagcttcagccgggcaggggagatgattggcttaagtcagtcggccgtcagccatagcgtcaaggagctggagcatcagaccggcgtccgtctgctcgaccgtactactcgcgaagtggtgctcaccgaggcgggtcagcagctggcgggcaggctggaacgtttgctcgatgagttgacgattaccctgcgcgacgccgggcgggtaggccagcagctgagcggcaccgtcaaggtcgccgccagtcagacgatttccgcccaccttattccgcagtgtattgctcacagcaatcgtcgttatcccgatatcgattttgtgctgcacgatcggccccagcagtgggtgctggagagtatccgccagggggaagtggattttggcatcgtgattgatccgggcccggcggcagaccttcagtgtgaagtggttctggcggaaccatttttgctgctctgtcgggaggatcatccttttgccagcctgacagaagttccgtggcaggcgctgcaggatgaaaggctaatcctgcaggattatgcgtccggcagccgcccgctgatcgatgcggccctcagcaggctggctatccgggcgaacatcgtccaggagattggccacccggcaacgctgtttccgatggtagaatcgggaattggcatcagcgttctgccggcgctggcgctaccgttaccgcaggggagccatctgacggtgaaacggctgactccggtgatggagcggcagctgatgctggcatgcaggaaaaatcgctcgctgtcgaccgccgctcaggcgttatgggaaattgtgcgtgaagaaggggagaatttaaccgccgccagggttgaagatccgctatatcagcgctgacaggggagattgctgcggagggactcgtggcagggccatgttccgcgcatagcaaaaaggcgcctttagggcgcctttttacattggtgggtcgtgcaggattcgaacctgcgaccaattgattaaaagtcaactgctctaccaactgagctaacgacccgaagtggtgggtgatgacgggatcgaaccgccgaccccctccttgtaagggaggtgctctcccagctgagctaatcacccacttcggtacttcacattttgacagaaaatccagctggcgagaaagtggtgggtgatgacgggatcgaaccgccgaccccctccttgtaagggaggtgctctcccagctgagctaatcacccacttctcaattttctgttctacacggcggagactacgttaagtagtggtgggtgatgacgggatcgaaccgccgaccccctccttgtaagggaggtgctctcccagctgagctaatcacccccgctgtgtggagtcgcattatagggagagttgaaaatgagtcaacgccttttctaaagaattcgttcgttcgtcgtaaaattaaacaaagcgatcgcgaaaccggcgccatagcatgatttataaacaaaaatggcaaaccgtgacgttccgatgggaacaacattgaggaatcagcccacggtgttagaatattgacccataatttccaccggacattgccggctatcggcatctttattaaacgtaaggccaattcatgaaaatcaaaactcgcttcgcgccaagcccaaccggctatctgcacgttggcggtgcgcgtactgctctctattcctggctttttgcccgtaaccacggcggtgagtttgtgctgcgtattgaagacaccgatctcgaacgctccaccccggaagcaattgaagccatcatggatggcatgaactggctgaatctgcaatgggacgaaggcccctatttccagaccaaacgtttcgatcgttataacaacgtaatcgatgagatgctggaagccggtaccgcttacaaatgctattgctcgaaagaacgtctggaagcgctgcgcgaagagcagatggcgaagggtgagaagccgcgttacgatggccgctgccgccatagccacgagcaccatgctgacgatgagccgtgcgtcgtgcgtttcgccaacccgcaggaaggttcggttatttttgacgatcagatccgcggacctatcgagttcagcaaccaggaactggacgatctgatcattcgccgtaccgatggttccccgacctataacttctgcgtggtggtagatgactgggatatggcgatcactcacgtgatccgcggcgaagatcatatcaacaacacgccgcgccagatcaacatcctcaaagcgctgaatgcgccggtgcctgtttatgcgcacgtgtcgatgatcaacggcgatgacggtaaaaaactttccaagcgccacggcgcagtgagcgtgatgcagtatcgcgacgacggctacctgccggaagcgctactcaactatctggtgcgcctgggctggtctcatggcgatcaggagattttcactcgcgaagagatgattgagttcttctcgctgggcgcggtgagcaaatccgccagtgcctttaacaccgataaactgctgtggttaaaccatcactatatcaataccctgccggcggagtatgtggcaacgcatctgcagtggcatatcgagcaggaaaatatcgacactcgcaacggcccgcagctggctgagctggtgaaactgctgggcgagcgttgcaagacgctgaaagagatggcccagagctgccgctacttctatgaagagttcgctgaattcgatgccgacgccgcgaaaaaacatctgcgtccagtggcgcgtcagccgctggaagtggttcgcgataagctggcggcgattagcgactggacggcggaaaacgtccatcacgcgattcaggcaactgctgatgagctggaggtggggatgggtaaagtcggtatgccgctgcgcgtggcggttaccggggcagggcaatctcctgcgctagacgttactgtccatgctatcggtaaatcccgtagcgtagatcgtatcaataaagcgctggcttttatcgctgaacgcgaaggcccggcgtcctgacggcgacgcagctgaaacaacggcaggttaccctgccgttttttttgtctgttattccggactggcgatgccgaggcgggcaagaaaaccgctaatcccttcccgggccagcagatcgcggagctgcagctgttctgccggagtcatcagctgtagggtttccgtgatttgccgccagatcgcgtctgcctcattgaccaggtatgcacctggcgattccgcgagatgattgtcggtaagcagatggcgtctggcagggatgttggtcagaaactcgcgtaccggttggtcgataaccaccagtcgcgctcgcccccctttaacgccgggtattgcttcggtgcgccattgtttctcgcgaacccagcgattgatcgtttgtctggccagccccaggcagtcggcaagctctgcgggcgtcattttatctttcagtttcatcatggtttaccgatcgcggatccctaaccgaagcagtaacccggtgatcccctcgcgcagcaacaaagacataagctgcttctgctcgctgggggtgagttctttactgagggtcagcagcagcgattccagatcgctatcatggggagaatagatgccgggcgtctccgccacccgctgggcgctgcggataaactccctgacttgctcattgacatggaccaggcgcgctttgccgccctggacgccaggtcgcggagaggtttgccagccttctttccgcacccacttattgatagtttgccgactgtagccggttagatgggcaatttcttcaggtgtcattcgttccttgagcatactatttcctgagtaaatgtatgggaattagctgcccatgttatagcatccttttacgtgaaaaggtgacctgtttaacttctgactgcgataaggctcgcaatgtcagcaagttgcctgctttttcagcgattgaatcgggaaggataattttgccgttgacacctgagcgaggaattcatattatgccgcccgtcaacacgacacgctttacgttacggggctatagctcagctgggagagcgcttgcatggcatgcaagaggtcagcggttcgatcccgcttagctccaccaaattctgcacccagcggatttggttcgtaaagaagtcctgtggggctatagctcagctgggagagcgcttgcatggcatgcaagaggtcagcggttcgatcccgcttagctccaccaaaattcagaaccctcgcttcggcgggggtttttgtttttagcgggtttcatgtaaagcactttctggttacgtcagttaatctccagcaattaaaatcgaaagtaatttcagactttttcctgataattcgccttgcctgccctaaataagcaacataacatttcccccattaaacgtgatgaggtttctggagttttaattaacaataatgcttgataaaattaacattaatatcaaaaaaactctattggcctttatcatttgtttagtcgctattccgctggctcgttttatttcaccgcaaacgataattgacggcaaccttatttatattgcctggctgccaatcagcgtgatgttttctgttatttttatctttggccgctatgcaattgcgccattaattctcgcgtttgccatcaccaatagttttctcattaaattaacgctgccgcaggcgtttatcttacttttttgtcaactgttcgccgtgtttgtctcctgcgctattctgcgactgttggtggggaagcgctggcgctgcggtccaacggcaaaacatatgggggcgcggatcttctggggcggcttcttcgcgccggtgctcctgaaaatcaccatgtatctcgccggacaatattttgcgtttccattagctattaccagttactttggtagtatgccgttgatttatactgtaatagatatccaaagtttaatcagtgcggcattaatttttacgacgtttctttattatccaatgcggatgattatcagtccgcgctacgcccgacgtttctggcagcaggaatgtttaccgtggctggcaccgcaatatcgctcctttaccctatattggtttatcgcgttggcggtgatattaacgctattgtgtgcgccgtatcagtctgaatttattgccggttatttagttccggttatttttattgtctactttatcggtatcagtcgaataggccatgcgctattgcgtatttcatggtctgtctcggcctttttgctggtggtatataacaaaaactttctccagggggtgcaaagcgagtattcactctcctttgtgctgtcggttctgatctcctttactatctgtttgttttatatggccgacatctatgcccgcagcgaccgcaacaaacgccgctggcgtagccaggcggaagaggatccgctgaccggcttgcctaacctgcgcgcgctggagagccatttacagagctgtcctcagcaggctatctgcagcctgcgtattgataatctcgactttctcagtcggcattatggtctgatgatgggggtggactgtaaacggcagattattcgggcgctgcaaccgctgctgggagcggcggataaagtcttccaggtaccgggcagcgaactgatcctcgtgcttgatggaccggagccgtcgtcccgcttgaaccatatggtcgcggtcctcaaccacaaaaagttcagctggcacaatcagccgctggatttggagtttggcgcggcctggggccgcgatgacggtcagggtgagggactttaccagatgctgggccagctaagctggctttccgaacaggcgggcagtgaacgtcgggtgctggcgctggacgaggagcaggatctggtggtggatcaaactaccgagcaggtgcgcctccttatgcgcgtcaagcaagtgctcaaagatcgcgcgctgatgctctatgcgcaaccgattcagaatccggagggggagggttatcatgagatcctcacgcgcatgcgctgtggcgatagcgtcattatgcccgaccgattcattccgctgattgtgcagtttaacctcagccaacgttttgacatgctggtgctggagaccttgttcagtatgctccataagcatcccggccagcgattctcggtcaacctgctgcctgcaactctgatgcaaaagaacagcgcagggcagattatcgcgctgtttcaacgctatagcgtctcgccagaacttataactattgaggtgaccgaagagcaggccttctctaatgcggacaccagtcggcaaaatcttgaagcgttgcgcgcgtttggctgcgccatcgctattgatgactttggcaccggctatgcgaactatgaacgtctgaaacatctacaggccgatatcattaagattgacggctgcttcgtccgcgacatcctcacggacccgctggacgccatcatggtgaaatcgattgtcgagatggcgcgggcgaaacagatgagcgtggtggcggaatatgtcgaaagcgaaccgcaaaaagcgcgcttgctggagctgggcgtgaattatctgcagggttatctgatcggtaaaccacagccgctgggtgaatgacgggcaaaaaaaagccgggcattgcccggctcagatgactgacgtctgttacagaaccagcgccgcaatcgaggcggacaacacgctaaccagcgtggagccgtacaccagcttcagaccgaagcgagaaactacgttgccctgttcttcgttcagacctttgatcgccccggcaataataccgatagatgagaaattggcgaaggagaccaggaagatagagataatgccttccgcgcgcggggagagcgtcgaggcaattttctgcagatccatcatggcgacgaattcattggagaccagtttggtagccataatactgcccacctgcagcgcttcgcttgccggcacacccatcacccaggcgaccgggtagaagatatagccgaggataccctggaaggaaatgctatagccgaaccaaccggtcacggtggcgaacagggcattcagcgccgagatcagcgcgatgaagccgatcaacatcgccgccacgataatcgcgactttaaaacctgccagaatatactcgcccagcatctcgaagaagctctgaccttcgtgcagattcgacatctgcagattttcttcgctctcttccacgcggtaagggttaattaatgacagaacgataaaggtgctgaacatgttgagcaccagcgccgcaacgacatactttggctgcagcatggtcatgtaagcgcctacgatggacatggacacggtggacatcgccgtcgccgccatggtgtacatgcggttgcgcgacattttgccgagaatatctttatacgcgataaagttttccgactggccgaggatcaacgagctcacggcgttgaaggactccagcttgcccatgccgttaactttcgacaggacggtaccgatcgcgcgaatgacaatcggcaggatacgaatatgctgcaaaatgccgatcaaagccgaaatgaagacgatagggcacaaaactttgaggaagaagaaggccaggcctttatcgttcatgccgccgaacacgaagtttgtcccttcgttggcaaacccgaggagtttttcaaacatctcggaaaatcctttcacaaaacccagaccaatatcggagttgaggaagaaccaggccagcaggacttcaatgacaagcagttgaacaacataacgaatacggatcttttggcggtcatggctgaccaacagggccagtatagccaccacaacgatcgcgaggacaaaatgcaagacgcggtccatagttgctccaaatatgaggcaggttaaatttccgtgcacattctatgcaacggctttaaagaaaacgagatcaattgcacactattgcaaggaactgtgaccaatggcaaaaatagtgatccaacatccacttttgttatgttacgtaaaggttttaaaagttgcattcttgtactactcttaatagcgggctggatctcgttttctgacgcccgtattccatttccggccagctattgttcccttctatcacagcaatcattatctccattctaaatgaacttgataatcattcgcattttgatagcatgaaacatagcaaaggctatatttccagaggcagaagatgactagcagtcgcgttgagaatagcagtagtcgcgccgcgcgcaaggtgaagctcgccttaatgggcccggctttcgtcgctgccattggctatatcgatccgggtaatttcgccactaacattcaggccggcgccagctttggctaccagctgctgtgggtcgtggtgtgggctaacctgatggcgatgctgatccaggtgctttctgccaaactgggcattgccaccggcaaaaacctggccgagcagatccgcgaccattacccgcgtcctgttgtctggttttactgggtacaggcggaaattatcgctatggccaccgatctggctgaatttatcggcgccgcaattggctttaagctggtgctcggcgtgtcgcttctgcagggggcggtgctgaccggggtggcgacttttctgatcctgatgctgcagcggcgcgggcaaaaaccactggagaaggtgatcggtggattgttgctgtttgtcgccgtggcctatgtcgtggagttgatcttttcccagcccgcgctggctcctctgacgaaagggctggtgatccccacgctgcccaacggggaggcggtattcttagccgccggggtactgggggcgacaatcatgccgcacgtcatttacttacactcatcgctgactcagcatctgcatggcggaacgcgaaaagaacgctataacgcgacccgctgggatgtggcgatcgccatgaccattgccgggttcgtcaatctggcgatgatggcgaccgctgcggcggcattccactttaatggccataccggcgtcgccgatctcgatcaggcctacatgacgctggagccgctgctgagccacgcggcggcgaccatctttggcctcagcctgattgccgccggtttatcgtcgaccgtggtgggcactttggcaggtcaggtcgttatgcaggggtttatccgctttcatattccgctgtggtttcgccgggcgatcaccatgctgccgtcgtttgtcgtcattctgctggggctggatcctacgcgcatcctggtaatgagtcaggtgttgctcagctttggcattgcgcttgccctggtgccgctgctgatatttaccagcaatgcgaagctgatgggggacctggtgaatacccgttgggtgagaggcatcggctgggcgatagtcgctattgtggtgagcctgaacggctggttaatagtggggtcgctgctcggggtggattaattgattcctgatgctgaataaagtaaaggggagccgatgggctccccttttcgtttgttagtgatggccatgtccatgaccgtgaccgcgcccacccgggccgcgtccccagccgccgcggtggtcatcgcggtcgttccagccagcacgatagccgcgctcccaggctttatctctgcctttgtaccagcctttgtgccagccgttgtcatgacgatgccaacggttatcacgccattcatagtgacgacgccagtaatcacggtcgcgccagctgccaccgtcccagtagttaccgtaattgtcacgatcgcctatttgtaattttaccgacggcagcagggtgatttcaccagcgttagcgaccagtggccctgcggccagcagtactgctgccagaatcagtgacctgaacatactcttctccttcacgatcggggccgtaagcggcctgttaacctgatattacgggccggtaaagacccgccgcatcggacgaactccgaaagcgcaggaaagagcactttttgctaaagtaacatttgctttacagcgcaaggatggcgtcgatggccgcgcactcctcggtggtgaaatggcgattctgcagcatgccgacggcatcatccagttgcgcggttttgctggcgccgatcagcaccgaggtgactttctcttcgcgcaacacccaggccagcgccatctgcgacagcttctgcccacgcgcttccgcctgcctgttaagctgacgaattttttctaatcgggcaggagtcagttgttccggctgcagaaaacgactgctgctggcggcgcgcgagtcggccggaatgccgttgagatagcggtcggtaagttgcccgccggccagcggtgaaaacgctatgcttccaatcccttccgtctgcagaaaatccagcagtccttcttccacgccgcgttcgaacatcgagtagcgaggctggtgaatgatgcagggggtgccgaggtcgttaaggatcttcaccgcctcccgcgcctgggccagaggatagttggagatcccgacatatagcgctttaccctgatgaaccagatgatcgagcgcacgcatcgtttccatcagcggcgtctgtggatcaggccggtgatggtaaaaaatatcgacgtattccagccccatgcgtttaaggctctggttaagactggctaccagatattttcgcgatccccagtcgccgtaagggccgtcccacatcgtgtagcctgctttagtggagatgattaactcatcgcgataaggcaggagcgactctttcaggatgcggccaaagttgctttccgccgagcccggcggcggcccatagttgttggccaaatcgaaatgggttataccgaggtcaaaagcgtgcaggagcatctgccggctggtttccactcgcgtttcatcgccaaagttatgccacaggccaagggaaatagccggtagctgcagaccgctgcggccgcagcgacggtactccatcgtttgatatcgcgtggtgcttgcctggtaaaccattcttcctccgccgacaaaacaggatgtgtatacgtttacactaaacaatgttctgcgtggagtacactgctttttctgcgtaattattgctttacactgccattatcagctcctatctggacaggcggatcgcttattcaatactcaaattacacctgcaccaaaatgaggataatggatatgcaaccgacctacactattggggattatctgctggatcgccttgtcgactgcggtattgaccgcttgttcggcgtgccgggagattacaacttacagtttctcgatcgcgtcatcgcgcacagcgccttggggtgggtcggctgcgccaacgagctgaatgcggcatatgccgctgacggctatgcgcgcatcaaaggggccggtgcgctgctgaccacctacggcgtcggcgaattgagcgcgctgaacggcattgcgggtagctatgcggaacatattccggtattgcatattgtcggtgcgccctctaccggcgcccagcagcgcggcgaactgctgcaccataccctcggcgatggcgattttcgccatttcgcccgcatgagcgagcagatcacctgtagccaggcgctgctgaccgccggcaacgcctgccatgaaatcgaccgtgtgctgcgcgatatgttgacgcatcatcgccccggctatttgatgctgccagccgatgtcgccagagcggcagcgattgccccagcccagcgcttgctggtggagcccgctccggcggatgaaaaccagcttgccgggttctgcgaacatgccagccgcctgctgcggggcagccgacgcatttccctgctggcggacttcctggcgcaacgttatggcctgcagaagacgctccgggagtgggtggcgaaaacgcctgtcgcccatgcgacgatgctcatgggcaagggattgttcgatgagcagcagagcgggtttgtcggcacctacagcgggattgccagcgcgccgcagacccgggaggcgattgaaaacgccgacaccatcatctgcattggcacgcgcttcaccgacaccatcaccgcaggatttacccaacatctggcgcgggaaaagactattgagatccagcccttcgccgtcagggtgggcgatcactggttcagcggggtgccgatggataaggctttggccgcgctgatgacgctttccgccccgctggcggcggagtgggctacgcctcaggtcgtggcgccggaggctgaggagggcgctgaaggcgagttgacccagaaaaatttctgggcgacggtgcagggcgccctgcgtccgggggatattattctcgccgatcaggggacggccgcctttggcattgcggcgctgaagctgccctctgaagcatcgctgatcgtccagccgctgtggggctcgattggttttactctcccggccgcctatggcgcacaaaccgcggcggcggagcggcgggtggtgctaattgtcggcgatggcgcggcccaactgaccattcaggagatgggctccatgctgcgtgataagcaaaagccgcttattctgctgctgaataacgaagggtataccgtggaacgggcgattcatggtccagagcagcgctacaatgacatcgctctgtgggactggcagcggctgccggaagccttcgcccctgacgttgcttcgcgctgccggcgggtcactcagacgtctgaactgcgggaggcgatgacggagagcatcacctccgataccctcaccctggtagaagtgatgctgccgaaaatggatatccccgatttcctgcgcgcggtgacgcaggcccttgaggagcgaaacagccgcgtttaatcggtatgccgtttggcaatcatcaacggtctcccggccagcagcagccaggccgggagcatcaccatacacaacagcggcagcaaagtcgtatccgggaccaccacggcggccataaacaggctcaaccagccgtcgcgagtgacgaccagcaccatgccgaggatcgcgcaggaaacggtgattgccgccggcactgcgtcaacatgagcatgcagcatcagccccagcgctaccccgacgaacaccgccgggaaaattcgcccgccgcgaaagccgctggctgaggcaagaaccagggccgccagtttgaccagcgcgataagcagaaaatccgcggcggttagcgtctggctgaaggccagctgctgcatctcatccagccctttaaagagcgttaagggcccgcctatcgtccccacgatccccagcagcagcccgccgataccgagggtcaggattggatttttcaaccgatgcatcagggcatgcagtcgcggcagacaccagacggccaccatgccgacggcgatagcgatcagggcgacgataatgccgctgagaatatcaacgaagcgcatctgaccatagtgcgggatcggcagcgaaaaatggggatggaaaaacagacccgtcgtcaacgcgccggcggcggcggcgaggaggggagcaaagaggcgatcccacagtggcgtatcgttgctgctattgagggtttgcgaaaaaatcagcgcggcggcaaccggggtaccgaagagggcgccgatggtgcctgaggccgcgaggatggtccagtccagcgagctgacgcgcggaaacagtcgggagccgacagcgacagccagcgcgatattcaccaccataatcggatgctccgggccgaggctgacgccgccggcgaggccgaggatcagcgcggccaggagtccgggcagcgcgccggtggcaatgggagcgccgattaacgactcggtcgctggatccggcccggcgtgcccggggctgtaacgaatgaccagacccaccgcgatgcctgtcgccgtcagcatggcgatgatccacagcgggctgtcggcgctcacccccaactgcgcgggcagattgctccacagcacgcgctgcagcagcgcggcaaccttcatcgccacgatcaggatcaggctgcaggcgatgcctatcaggatggccggcaccgacaggatcagcattgttctggcgcgaggatggagcatggaaatgtccttgtaaaagtgctggagcactactttgccttcgtcagcggagaccgtcgatgcaaatggtgctgaaacgataaagttaaggtgacatctgatatccggcgcgtcctttacaggctaccttgcatagattacaaactaaatgtgacctgtgtcgctaaacaaggggcgtctgcgcgttggacgttgttgttaagccgccatgaatttacagtgtgccaaaagatttattttgactttagcggagccgtaacggaatgacaaaatttgctttagtaggagatgtcggggggaccaacgcccgcctggcgctatgtgatctggcgagtggagagatctctcgcgcaaagacctattccgggctcgattaccccagtctggaggcagtggtgcgcgtctacctcgaggagcaccaggtaacggtcaacgaaggttgtatcgccatcgcatgcccgattaccggcgactgggtggcgatgaccaaccatacctgggctttctctatcgccgaaatgaagcgcaacctcggctttgcccatctggagataattaacgattttaccgctgtttcaatggccattccgatgctgaaagctgagcaccttattcagtttggcggcagtgcgccggtagcgggcaaaccgatcgccgtttatggcgccgggaccgggctcggcgtggcgcatctggtccacgttgataagcgttgggtcagcctgccgggcgaaggcggtcatgttgattttgccccgaacagcgaagaagaagggatcattctggaagagctacgcgccgagctggggcatgtttccgcagaacgcgtgctctcaggtcccgggctggtcaacctgtatcgcgcgattgtcaaatcggacggccgactgccggagaacctgcagccgcgtgaggtgaccgagcgagcgctggcggacagctgcaccgactgtcgtcgggcgctgtcgctgttctgcgtcattatgggacgcttcggcggtaacctggcgctgaccctcgggacgtttggcggggtgtatatcgccggcggcatcgtgccgcgcttcctggagttctttaaagcctctggtttccgcggcggttttgaagacaaaggccgttttaaagcttatgttcaggatatcccggtttacctgattgtgcatgataacccaggcctgctgggctccggtgcgcatctgcgtcagacgctgggccaggtgctttaagcattcttctcccgggctaccgtcgtagcccggatggcggtgctttccgctctctacagattcatcagctggcgaaactctttcactttactgcgactgaccggaacctgaaactccaggtcacgcaggcgcagcacataggtgttgttgaaccacggctcaatttcccgaattttgctgagatttacgcaatacgagcggtggcagcggaagaaatgcgcggtgggcagtttgctgcagaattcagtaatgttcatcggcatgacgaatgactcccggcgggtatagacgaatgtcatcttttcatgtgcctcggcataataaatatcatgaatactggtgacgatgatccgctcatctttgatcagattgatggtgtcgttttcccgtggcgctgcgctggctaatcctgaagcagcgttattttgctgctgccaggcggtggtcagcttttgcagcatattgatgatgcgcgactcctggtaaggtttcaggatgtagtcaaaggcttccagctcaaaggcttccaccgcatgttctttccacgcggtgataaagacgataaaaggtttatgggcaaactggctgatgttttgcgccagcagaaccccgtcgagcgacggaatattgatatcgagaaagatggcgtcgaccttgttgtgctggagaaatttcagcacgtccaggccgtcgtcaaagctgccgacgatctccatctggctatgggtgttaataagccaggagagctcctgctgggccagaaactcatcctccacaatgataactttcatcttttctccgctcatgacaacagcgactccgtcagcgcctgcggcgtagagttattggggacataaaaggcgatttcggttcccggcgtcagattgcggatatgcaaaccctcgccgtagagaagtttcacccgatgatgcacattgagcaggccgattttgttacccggcatctcatcggcttccacgcgggcgaccacggcgggatcgataccgttgcccgtatcgcgaacgctgatgcgtacccgattgccgcactcgttaatgccgatcgtcaccacgcctttgcctttacagggttgaataccgtgaacgatggcattttccaccagcggctggataagcaggctcgggatcacgcagctgacgtcgtcgtcaatatcgtagatgaccgtcagcttgtcgccgaatcgcgcctgttcaatagcgatataatctttgatctgatacagctctcgtttgatatcaatctgctcatcgtcttttaattcgatgttatagcgcaggtagcgcgacagattaaaaatgagctggcgcgcggtgtccggattaaggcgaatcgaggaggagatcgcgttcagcgcattaaataaaaaatgcgggttaattttgctttgcagggcgcgcagctccgctttgttggccatctcccgcaactgttcggcgcgggagacttccagctgggtggagattatttgcgacaggccaatcgccatctcctgcagcgtcgaagtgatgcgatgggcgtggcagtaatagatttttagcgtgccggtcaccacccctttttcccacagcgggatcaccatcaaggagtggatctccggggtacggtgggcttcgtcattgttttttatgatgattttcccataacgaatcgcctgccgggtggtggggctaatcatatcgtcgtggcgttgatagttggcttcaccgacgcccacgtaggccagcacgtgctcggtattggtgatcgccaccgcgtcggcggtaatgtcgcggcggataatctcgcaaacctggcgcagagaatcgctgttaacgtgtcgaaacagcggcagggttttgttggcgatatcgagcgccagtttcgcctgccgcgccgcgctggcctccttttccccttcaacgctctgcaccagcagcacgataaagccgatgcagacgctgccgaggatcatcgggataccaattttcgaaacaatatctacgccgagactcagggaaggcgcccagaccaccaccaggatcatggtcagagtttcacacatcatccccgccagaatgccgattttccaccgttgttcgcgggccactttacgattaatcaaccccgacagcaggccggcgacaatgctggtgataaagcagggcaccgcggtcacgccgtcgatatcaatcaaatagcggtgcacgccggcaatcgccccgacaatcgcgcccacccagggaccaaacaggatcccaccggacatcacggcgataatgcggacgttcaccagggacccctcaaccgggacgccggaccaggtactaaatagcgcgaacagcgagaaaatggctgtcaccgccagcagctctttcggagtatgggccgacttatgcaacagttcgcggaacaggcgcaggcgaataaggaaaaagaggcaaataagcatcagggccgcacgatcatagaccgccagcatcatagtaaagatttcgtgcatgggtgcgccgcgtcagtggccagaaagggacatgataaaaaacctgacggcagaagaccagccgtggaaccataaagcggaaaagtcacactttttaaaggggattaattaaaaagcatcgcgatagcggcggtcttcgccattaacgataatattctgtgttaagaaagatatcagtgtgttaccacttttatacaacccgggattattccgccaatgaactgccgcatttagcgcagtcgatacccgttttatatgccagggaatattttttaacgggcctctcgacaacatgaattttttcaggttattttctaaacgagccgcaacagcggcagcgtcgctcggacggtccgggcgctaacgttaattagaggaacctatggctgaatccagtcctgaacgccgttttacgcgtatcgatcgtctccctccgtacgtttttaacattactgctgaactgaaaatggctgcgcgtcggcgcggcgaagatattatcgatttcagtatgggtaatcccgatggcgcgacgccgccgcatatcgtggaaaaactctgcaccgttgctcaacggcctgacacccatggttactctacctcgcgggggatcccgcgcctgcgtcgcgccatttcacgctggtatgaagaacgctataacgtcgatatcgatccggaatcggaggcgatcgtcaccattggttcgaaagaggggctggcgcacctgatgctggcgacgctggatcatggcgacaccgtactggtgccgaaccccagctatccgattcatatctatggcgcggtgattgccggggcgcaggtgcgctcagtgccgctggtggaaggggtggatttctttaacgagctggaacgcgccatccgcgagagctatccgaagccgaagatgatgatccttggctttccctcaaatccgaccgcgcagtgcgtcgaactggatttctttgaaaaggttgtcgctctggcgaagcagtatgacattctggtcgtccacgatctggcctatgccgatatcgtgtatgacggctggaaagcgccctccatcatgcaggtgcccggcgcgcgagatgtcgccgtcgagttctttaccctgtcgaaaagctataacatggccggctggcgcattggctttatggtgggtaataagactttggtgaatgccctcgctcgtatcaaaagctatcatgactacgggacttttactccgctgcaggtggcggcgatagctgcgctggagggcgatcagcagtgcgtgcgcgatattgccgaacagtataagcgccgtcgcgatgtgctggtcaaagggcttcatgaggccggctggatggtggagtgtccgaaagcgtctatgtacgtgtgggcgaaaataccggaaccttacgccgccatggggtcgctggagtttgcgaaaaagctgcttaatgaagcgaaggtttgcgtctcgccggggattggctttggcgactatggtgatacccacgtccgcttcgcgctgatcgagaaccgggaccgtacgcgccaggcgatccgcggtatcaaggcgatgttccgcgcggatggtctgctggcctccgcgagctagcgctgcgggcagtacggcaaaataaaaacgggagcatgaaggctcccgttttttttgacaccgctgcagtctagatcatcagggcaaaagtaccggcccaaacgatgaccataaaagagaggcccataaagaagtatttcacgactcatcactccacgcgcttgtgcgacgttcaaatgaattaattgttctgtttttcaagggctgtcgccagtgtaacttcaccctgcagcagcccgtaattctgtgcgtttagtgctccagatggcgctaatgtacgcctaaaaaatcagggaaacaagaggcatttttttattaatttttagttacttacgagtgtcgtgattcggcgacacattaatttcacagggtaataaatttagcgccagcgacgcgaaggaaacgggttttagcgatggggcgggcggagaaggccaacgagagcgcgcggcattatctttgccacgcgccgccgtcggttcagggcaggtctgaggcgcgctgtcgccactcggccgggtagtgtgccgggataaagcgcagcgtcagcgccatgagtagcaggacgcagatcgcatgccaggaccagtcaagcgtgtagttcccgctcaggctacgcagcaggcctgaaagccagggcgacagaccggcgatgataaatccgatcccctgcataaaggctaccagcctgccggccaccgccggttgtccggcgtgatccagcgccagcaccaggcacagaggaaacgcgccgcccaatcccacgccgcaggcaatggcccagagcgcagagaaatgctctggcagccagataaagccgcagaagccaatcagctgtagcgccagcgctagcagaagaagctggcgccgatcctcctggcgagccagcgccgggagcagcagcgcgccggcggtttgcccgacggtcagcagcgccagcagcgaaccgctgtactgggcgctgtcgcctagctggatgtagtaaggaggcagccaggcgatcaggctggcgtaaccggcattgatcagtccgaaatagagtcccagcgtccaggcgcggcgctggccaataatcgcgacccgggaggaagcgctggtctgatgcggtgcgcgaggcaaatgccgacaaatcgccagccagctgagcagagccaggagcgcagggagcgcccaccaggctagcgcatcatgccaggccgcgctatgtgacgccagccatggggtgaacgcggcgcctaacccgccgccgcccatcagcgccgctgaccatagtcccatcaccagcggcgtccgtcggggaaagaggtgcttaattaccgccgggatggcggcctgaataatgccgatgccaattcctccggccagagcgctggtgagcagtaagccactattcggggcgatttcccgcagcagggcgcctgccgcgataatcagcaggctcagcgcaatactgcgcttttgaccgatatagcgatcgacccagccagcggccagcgccagcacccccatcgcgatcaccggcagcgcggtcaggagtgcggccagggtatagctcatgccgctggctgcgcggatgtccggcagcaaaggaccaatggaggtaagcagcggccgcatattgatcccagtcagtaccaggactgccagcgtcaggttctgtcgcagcgctggtgtcatgactgccgttccgcccagcgctgataaagttcagttccctccggctgcgggcgatgatggatcgacagcgtttgctgggccagcggctgctgcagctgctgataaatcgcggcggtcgagagctgaaaaggctccccgtcctgattgctattggcgaaaaacacttcccgcacgccggttaaatagagcgcgctcaggcacatagggcaaggttgtccgctggcatagatgacgcattcgcgcaacaccgcgcttcccagtctggcggcaagatcgcgaacggcgttcagttcggcatgcgccgttgggtcaccgctcagatgaaaggtattgacgctttcagcgacaatctcatcattccgcaccagcacggcgccgaaggggcgcccaccgtcagcaatgttttgttttgccagcactaatgcgcgctgaagataacgatcgtgagcggacatagtcactcctgcataaaacgatgttaaaggtgaaatatgttgagggtcgtgcgaagagggtacgtctcttgttttataagttaaaagacttatttatgataatgcctattggaatttcttataggtgggccgatgcttctgcgccaactttcctactttatcgctgtggctgaacattgtggcttttcccgcgccgccgcggcgctgcatgtctcccagcctgcgctgtcacagcagatacgccagctggaagcgatgctggaggttcagcttttcgaccgctctggccgacgtattcgcctgaccgatgccggtgagatctggctggagtatgcccgtcgcgcgttacgcgagcttgaggaaggtcggcgcgccttgcatgacgcagaagatctccagcacggtaaactccgcattgcaatgacgccaactttcactacctatatgctgggcccgctgatggaggcgtactaccgacgctatcctggagtaaaagtgcttatccaggagatgaaccaggagcggatggaggcgatgctgctggaggatgaactggatgtggggattgcctttgacgattgccggtcacaggagattgtggttcagccgctactgacggaaacgcttgcgctggtggtgagccgtgcgcatccgctggcaggagagcgcgacttgcaactgcaggctctcgacgcccagccgctaattttactgagcagcgagtttgctacccgcgagcagattgatcgttattgccgccttcatcggctcgaaccagacgtgcggatggaggccaactccatcggggccgttctgtcggttattcgaagcacaacgttagcaacgctgctgccggcggcgatcgccggacagtttgatgatgtggtggcgattgagctaagacctgcgctgctgcagcgcacggcctgtttattgcagcggcagggcgcctggcagagcgccgcagcgcgcgaattcatcaccctggcccgagagaatgcgataacgattgagcaggaaaaccgccagtcccttgcctgaaggattacgttactcgccggcgaactgcgactcacggctggcttcgctgccgatatcgccttcatcgggctgggcattctctataagcatgccttcttccttaagcctttccagcacgtgatgaaagagctgagtcttgtctggctcagccatactctgcaacttctcattaaatacagtatgggactgaacaagataatggataaattccagcaatacctcactttgcggcaggacggttaattcctgctggatgtaacgggtttgatccagtagcggatttttcgtcacgtccataggccgggcgctaatactgtgggcgtatattttctcaatggcctggctggtgatatagatgcggttcaatgatatcgaggggcgttcgtcttcctctggaatgaaatgacaataaacaaatggtttatccggcagcatcatgctgaggcggttttcgaaaagaatatcatctggcgcctccagcagcgccattaggttccgacagtgtggatgccagagccctgaagcaaatacctttacgttgaactgggttaccgtatttccgcgcagggtttccatcgtcggaatatcgccttcaagccgcagaatgctgcggatatgggagtgttgcgaccagactgtttctcctgcctcgactgaggtaaatggattaaacgcgctggttacctctttttcctgatgggagaggacggcgatttttaatattcccggcgttgggttaagcttaagacatagattgattgcgcctatatcatgccagtgaagaatgtcttcgagttcgcagtttaataatttttgcgcccgcgccagagagcaatactccattggcggtaaattatttagcttccagatattccgttctgtaatattcataagaattgtatgtcgatgaaaaaataaatcgccatggtgagcaaaagtatcaatgacaatgatttattttttctgctgacttcctttacctgattaacaaaatccattcacattgagaataatatatcgataaattggctgtttttattgttttgctgccgcatatttactctttcccgttatcttatcatctcttattcgtagagaaaaatagtttgctgaatataagcgtttcttcctgtttagcagcaatatttaaggtgagtatgagcggagcacgaaaaaagggacggtcaatttggcaaactttgtggtcggcaggaagtatcaaacagacgcctgcggcgcctgtcgaacctacctgtggttattgcggcatagacaggaagcggtcacccggttgcgcgatggcataccaggccatcatttcggcagtgcctggctggccttcagcaggcgcccaggccatagtgtccatttcggcaagcggttgataagcgccttgtttgacttcaaataccatgccgcctgcgtcgagcgagagcaccgtatgccaggtgccagcctccatttccagcgccgtgcaggtttcacccagcaccacccggcgggtaaccacgccgtggtcatcaaaattcagtaccacaaatcggcctttcagcggcagtaaaagttcgaaggtatgtctgtgccggtgggggcggatataggtgccgggttccatggcgatggccagacgctgtatcgggtcgcttagttcgggatgaaaattgcgatgggcacgcaggcgcggagcactggctgccgcttcgctctgctgctgcatatcgctgagggtgatctgtttcatatcaacgcctggctcctgtatcgtccagagaaggttgtaaaaggtcgcggctagtgactgaaaaagtcagaaggtattgtacgcagaaatgcgcgttgctgtcggtttattgtgtgcgtgattgacaaagacacgttcctttctggcaggactaaccatactgaaatcgttggctaattatgattacgagaagaatacgttctggctggcgtttaagtcatcgtggtgaatggcgggcaacgtttatatggtgtcccctgcaggaatcgaacctgcaactagcccttaggaggggctcgttatatccatttaactaaggggacatagaacttactgatttttaagcgttcagctt

SEQ ID NO: 5330 - DNA, 178605 bp, Unknown
  gut microbiota DNA sequence
cggatcgtaagccggctgctgatacggcgctggctcaggctgataggcctgcggcgcaggttgaccggcacgcggatcgtaaaccggctgttgatacggcgctggctcaggctgatacgcctgcggtgcggtttgccccgctggcggctgataagcagcctgctggaacggagcgggttcaggctgataggcctgctgcggcggatagctggcttccggctgataagctggcgcagcgccgtgatggcccaccggtgattctgcccacgcctgcggcgcggcagtagccgccgccgctgcgcttaccggctcagcgatactgtggccattcaacaacggatcgtaagggtcgaaatcgcccgggcgcacggcgctggcgccggagaacagcacatcatcctctgcgggacgcgcggcgctggcgccggaaaacagtacatcgtcggcggcaacaggcgccccgctggcgctgtattgcaccacctcttcgccgtcatccatccgtttgccggagaaaagcgcagcgtcggttttacgccccatagggttggtaaacttctcggccagacgcttacgccgcgccagcgcgctgcgtaagatacgggcgcgacgcgattcctgcggcctggccgcctcttcgtcgtcgtactcttcctcgtcgtcttcgtattcgccttcatcgacccaggtatcatcccgacgggtacggttgctggcaaaggtgagaacggacaggatgccgccgcccagcttttccgcaatgctgacccacgaccagccggtgaacagcgtcagcccggccgcccagatacacaacagggcgatggtgccgccgctgctgtgcagcaggggttgcagcgtggtgctcagcaggctgccgatcaccccgccggaggcgaagtaccagatatcatcggcgttaatcgccgccagaccacaggaggtcaggatcagggctaacgcaccgatgaggcgaagggaaacggcaaaataatcaatgtattcgtcgttttcctgatgccgccaggcaaaccagcatccgccgatgatgatcaccgggatggtgtaggccatgacgccaaaaatgaaaaagagggtatcggcaagccacgcgccgggggcgccgcctaaattatgaataggctcatgccatgccgtttgcgaccagctggggtccgaggggttaaagctcagtagtgccgccatcagccagatggcgaagagggagcaaaggatgagcatcgcctcaaggagtcggcgcccgctgctgagtttggttagtttgacttctttgtcttcggtgtattcctggctcaagaaaggctctccaggtatcaggctgtttcctgcctgctgctaaaacggacaacagcgccgggtctccccggcactgttgctgtatggattaacaggagtgtaatcaaactacgtcgagtttgcacctgttccgtgttagcgcgtcttaataaccagacgattactttgcttgacttcttccattaccacgtaggtacgggtgtcgttaacgcccggcaggcgcagcaaggtctcgcccagtaatttacgatacgctgacatatccggtacacgggttttcaacagatagtcgaaatcaccggaaaccagatgacactcttgaatttcttcaagtttttgcactgcggcgttaaattgctcaaacacatccggtgcgccacgattcagagtaatctcaacaaataccagaagtgatgcatccagataatgcgggttgagcagcgccgtatagccctgaataaaaccctgtctttcaagacgacgcacacgctcaaggcaaggcgtcggagaaagtcccacccgtttagaaagctcgacgttagaaattcgcccatctttttgcaattcattcaggatgttacgatcaatgcggtcgagatctttgccagggcgcttcttgctatctaccattattattgtctctctgtattccttccctactcctgttccggctctgagccttcactgccagagcccatcctgttatcacccgtacgacattgggtaacccaggggtacgtgagaagcccgttgcctgacggcagtcaccgacatcacgcatggcgtctgtccacaccatgcgtagatttcgttaacccggataaaaatggcatttgcgtgcatgaaaattcgccgcacgctaaatactgcttttcttcttccttgaatgttttcgcaaaagcacaggtgattgtcaaagcaaaacatcgatttttagtacaagatgccagatattcatcatccgccctggttgattctcattttttcgtcttataattgtcccaccgacagtagaaatagttatattccttgccgggaaaatcaccaattcattggcagcttctattgcacacatcgttaacaaaatcgctgtgctctttttttacgacaacaaattccctacaatcccagcccaatgtatgccaattattatggggatctcatgggcacagccaaacacagtaaactgcttatccttggttctggacctgcgggatacaccgcggcggtctatgccgcacgcgccaacctgcagccggtgctgatcaccgggatggaaaaaggcggtcagctgaccaccacgacggaagtggaaaactggccaggcgatccgaacgatctcaccggtccgctgctgatggagcgcatgcacgagcatgccgcaaaatttgaaaccgagatcattttcgaccatatcagccgcgtcgatttgcaaaaccgcccgttccgtctgacaggcgacagcggcgagtacacctgtgacgcgctgatcatcgccaccggcgcttccgcccgttacctgggcctgccttccgaagaagccttcaaaggccgcggcgtttccgcgtgcgctacctgcgacggattcttctatcgcaaccagaaagtggcggtgatcggcggcggcaacaccgcagtggaagaggctctgtatctgtcgaatatcgcctctgaggtacacctgatccaccgtcgcgattccttccgtgcggaaaaaatcctcatcaaacgcctgatggataaagtggcaagcggcaacatcgtgctgcataccgatcgtaccctcgaagaggtgaccggcgaccagatgggcgtcagcggcctgcgtctgcgcgataccaaaaacagcgacaatgtcgagtccctggaagtggctggtttatttgtcgccatcggccacagcccgaacaccgccatctttgaaggccagctggagctggagaacggctacatcaaagtgcagtccggtatccacggcaacgcgacccagaccagcatcccgggcgtgttcgccgccggcgatgtcatggaccatatctatcgtcaggccatcacttctgcgggcaccggctgcatggcggcgctggatgcggagcgttacctcgacggtttggctgacgcttgcaaataatctttacaagtcagtaacaaaggtaaagaaggcgacgaaaagtcgcctttatttttgctgcgatgtaacattgccgtgcccaatactccgataacgacacctgcaaagcgcgcaatgaataaaacccgtcaacaagagttaacccgctggttaaaacagcaaagcattatctcccgtcgctggttgatgatttcccgcctgcttggcgtggcgagcggtctgctgatcgtggcgcaggcatggttcctggcgcggatcctgcaccggatggtgatggagaatattccagcgaccgccctgctgctgccgctcacgctgctggtgctgatctttgtactacgcgcctgggtggtctggctgcgtgagcgggtcggctttcaggccgggcagcatattcgctatgaaattcgccgccaggttcttgaccgcctccagcaggcaggcccggcgtggatccagggcaaaccggccggcagctgggcaacgcttattcttgagcaaatcgacgacatgcacgactattatgcccgctacctgccccagatgacgctggcggcctgcgtaccgctgctgatcgttattactatttttccgattaactgggccgccgcgctaatccttctcggcaccgccccgctgatcccgcttttcatggcgctggtcgggatgggcgccgccgacgccaaccggcgtaacttccaggcgctggcccgcctcagcggccacttcctcgaccgcctgcgcggcatggaaaccctgcgtatttttcatcgcggtcaggcagaaaccgataatattcgcgacgcctcgcaggattttcgccaacgcaccatggaagtcctgcgtctggccttcctctcctccggggttctggagtttttcacctccctctccattgcgctggtagcggtgtattttggcttttcttaccttggcgagctgaacttcggccactatggcgcgggcgtcacgctgatggcgggattcctgacgctgatcctcgccccggaatttttccagccgttacgtgacctgggtaccttctaccatgccaaagctcaggccgtgggcgccgcagacagcctgaaaacgtttatggaaacgccgctgacccaggtagagcgtggcgagaaaacgttaaatgacaacgatctgattagcgtggaagcgcgcgacctggtgatcaaatctccggaaggtaaagttctggcggggccgcttaattttgcgctgcccgccggcgctcgcgtggtgctggtcggccagagcggatccgggaaaagctctttgctgaatacactgctcggctttctgccctatgaggggtcgctgatggtcaacggcgtagagctgcgcgagctggacgctgagcgctggcgccgcctgctgagctgggtaggacagaatccgcagttgcctgccgccacgctgcgggaaaacgtgctgctggcgtggcccgaagctagcgaagcacagcttaggctggcgctggacaaggcctgggtcagcgagtttatcgccctgctgccgcaggggatccataccgccgtaggcgatcaggcggggcgtctgtcggtaggccaggcgcagcgtatcgcggtcgcccgcgcgctgttggtgccgtgccgcctgctgctgctggatgaacctgccgccagccttgacgcccatagcgaacagcgagtcatgcaggccctgacccacgcctccagtgagcaaaccacgctgctggtcacccaccagctcgaggggctggccgactgggacgacgtctgggtgatgcaggacggacagattatcgaacaaggcgactatgccacgctggcccgtgctggtggggtcttctcggcgctgctggcccatcgtcaggaggagatttaaatgcgcgcacttttaccctatctggcgctctataaacgccataaatggatgctgctgcttggcgtcgtgctggccattgtgaccctgctggccagcatcggcctgctgacgctctccggctggttcctctccgcttcagcggtggtgggcgtcgccgggatctacagttttaactatatgctgcctgccgcgggcgttcgcggcgcggcaattatccgtaccgccgggcgctactttgagcgcctggtcagccacgacgctacctttcgcgtgctgcagcacctgcgcgttttcaccttcagcaaactgctccccctctctccggcggggctggcgcgctttcgccagggtgagctgctcaaccgggtggtggccgacgttgacaccctggatcatctctacctgcgggtcatttcgccgctggtcggcgcgctggtggtgattgtggtcgtcacctgcggattaagtctgctcgacgtcaccctcgcgctgacgctcggcggtatcatgctggcgaccctgctggttatgccgccgctgttctatcgcgcaggtaagccagccggcgaaagtatgacgcagctgcgcggccagtatcgccaacagctcaccgcctggctgcagggtcaggcggagctgatggtatttaacgccagcgaccgctaccgcgcacaaatggaaaagaccgagctgagctggcaggatgcacagcggcgccaggccgagctgaccgcgctttcgcaggcggtaatgctgttaatcggtggcatcgccgtggtggccatgctctggctggcctcagacggcgtcggcggcaatagtcagcccggggcgctgatcgcgctattcgtattctgcgcgctggcggcttttgaagccctggcgccggttactggcgctttccagcatttaggccaggtgatcgcctccgcgcggcggatctcgcagattaccgaccagcagccggaggtcacctttgtcgaagatgaagccagtttgccagcgcaggtggccctaacgcttcgggaggtcaccttccgctatcctcagcagccctcccctgccctggagaatatttccctgcagattgccgccggagagcacatcgccattcttggccggaccggctgcggaaaatcgacgctgttgcagttgcttacccgcgcctgggacccgtcacagggagagattctgctcaacaatcagccgctctccggcctcagcgaagccactctgcggcaggcaatgagcgtagtgccgcagcgcgtgcacctgttcagcgccaccctgcgcgacaacctgctgctggcggcgcctgaagcggatgatgctcatctcagcgctacccttgagaaggtgggcctcgaaaaactgctgcaagatggtggtcttaacggctggctgggcgaaggcgggcgtcagctctccggcggcgaactgcgccgactggccattgcccgcgcgctgctccacgatgcgccgctgatgctgctcgatgaaccgacagaaggtctggatgcggccaccgaaagccagatcctgcatctgctggcagatgtcatgcgcgacaaaaccgtgctgatggtgacccatcgcctgcggggcctggcgggttttaatcagataatagtcatggacaacggccagataattgagcaaggtagtcacgcggagctgctcgctaaacagggccggtacttccagtttaaacagcgtctgtaggctattctattatctaatttttgctgatgcgtattgaggttaaaatgcgtctggttcagctctcccggcactctattgccttcccctctccggaaggcgccttgcgagaacctaatggcctgctggcgctcggcggcgatctgagccccgcacggctgctgatggcctatcagcgtggtatttttccctggttttcccctggcgacccgatcctctggtggtcgcccgacccccgggcggtactttggccagagcaattccatctcagccgcagcatgaagcgctttcatcagcgttcgccctaccgggtcacgctcaaccacgcctttggcgaagtgattgagggctgcgccagcgatcgtgacgaaggcacctggataaccagcagtatcgttcgcgcctatcaccagctgcatgagctgggtcatgcccactccattgaagtctggcaggagaataccctggtgggaggaatgtacggcgtagcgcagggagcgctgttttgcggcgaatcgatgtttagccgggcagaaaatgcctccaaaaccgcgctgctggtattttgccaggactttgcgcacagcggcggtaaattaattgactgccaggtactgaacaaccataccgcgtcattaggcgcagtggatattccccgccgcgattatctggactatctgtcggtattacgcggctaccgactgcccgagcgattttgggtgccgcgggtgctatttcctggcggataataaaatgttttcagcacattttgcgtcaggatggtataattgcgcggtagagtagcttctgcctgttgccccgccgccgtttgggaataataagagtcagataacgcccatcgttctgtcactcccctttacgtttgcgcctgtcacgcggcatggccgtgtgtgtcccgggcaatgcgccaaaactacttcggcgattcatacccgtcatatttccgtagccgctgcgctgactatgcgccttgcggcaaggtgaatgattcagggtagatacgtaaaactttacttacatgatgaacttcggcattatcttgccggttcaaaactacggtagtgataccccagaggactagatggccaaagaagacaatattgaaatgcagggcaccgtacttgaaacgttgcctaacactatgttccgcgtagaactggaaaacggtcacgtggtaaccgcgcatatctccggtaaaatgcgtaaaaactacatccgcattctgacgggcgacaaagtgactgttgagctgaccccgtacgacctgagcaaaggccgcattgtcttccgtagtcgctgattgttttcgcccctaaggcgtcagatgctgaaggccgggataattcccggtcttttcatttctgccgtcagcaaaaaaaaaccggcccctggccggttttttacattgaagatatcgccttagtgggccgcttccggtttgtgcttcggcgcgctctggaagtcgtaagtcagcgtatttttgtcgctgtccagagagacagtgacctgaccaccgtcgaccagcgagccaaacagcagctcgttcgccaacggttttttcaggttgtcctgaatgacgcgtcccattggacgtgcccccatcgcccgatcgtagcctttcgtcgccagccagtcgcgcgcttcctgactcacttccagggagacgcctttctggtccagctggacctgcagctcgacgataaacttgtcgacaacctgatggatcaccgtggtagacaaatgatcgaaccagatgatgttgtcgaggcggttacggaactccggcgtaaagatctttttgatctcatccatcgcatccggactgttgtcctgctgaataaggccaatggatttacgctcggtttcgcgcaccccggcgttggtggtcatcaccagcaccacgttgcggaagtccgctttacggccgttattatcggtcagcgtcccgttatccatcacctgcagcagcaggttgaacacgtccggatgcgctttttcgatctcatcaagcagcaataccgcgtgcggatgtttaatcaccgcatcggtcagcagcccgccctgatcgaagccgacgtagcccggaggcgccccgatcaaacggctgacggtatgacgttccatatattcggacatgtcaaagcgcagcagctcaatccctaacgccttcgccagctggacggtcacttcggttttcccgaccccggtcggcccggcgaacaggaacgatcccaccggcttgtgctcatggcccagcccggcgcgcgccattttaatagcctcggtcagcgcctcgatggctttatcctgtccaaagaccagcattttcagacggtcgcccaggtttttcagcgtgtcgcgatcgctgcgggagacgctcttctcagggatccgcgcaatgcgcgccaccactgattcgatatccgccacgttaaccgttttcttacgcttgctgaccggcattaagcgcgcccgcgcgcccgcttcgtcaatgacgtcaatcgccttatccggcagatgacgatcgttaatgtatttcaccgccagttcaaccgccgcacgcaccgctttggcggtataacgcacatcatggtgcgcttcgtacttcggcttcaggccgttgataatctggaccgtctcttccaccgacggttcggtaatatcgatcttctggaaacggcgggccagcgcacgatctttttcaaagatgttgctgaactcctggtaagtagtggagccgatcacccggatcttgccgctggaaagcagcggtttgatcaggttagccgcatcgacctggccgccagacgccgcccccgcaccgataatggtgtggatttcatcaataaacaggatgctgttggtatcctgctccagctgtttgagcaacgctttgaagcgtttttcaaaatcgccacgatatttggtccctgccagcaaagagccaatgtcgagcgagtagatagtgcagtcggccatcacttccggcacatcgccctgcacaatacgccaggcaaggccttcggcgatcgcggttttaccgacgccggattcccccaccagcagcgggttatttttccgccgacggcacaggacctgaatcgcgcgctccagctctttttcacggccgatcaggggatcaatgccgccgacgcgagcaagctgattgaggttggtggtgaagttttccatacgttcctccccgccggcttgctcttcattgccaggctggcttccgctgttatcggaagactggctcggctcgtctttgcgtgtaccatgagaaatgaagttcaccacatcaagacggctcacttcatgtttacgcagcaggtaggcggcctgcgactcctgctcgctgaaaatcgccaccagcacgttggcgccggtcacttcgctgcggccagaagattgtacgtggaagacggcgcgctgcagcacacgctggaagcttagcgtcggctgggtgtcgcgctcttcttccgtggctggcagaacgggtgtggtttgttcgatgaaggcttcaagttcctgacgcaatgccaccaggtccactgaacacgcttccagggcctcacgggccgaggggttgcttagcagagccagcagcaagtgctcgacggtcataaactcatgacggtgctcgcgcgctctggcgaaagccatatttaaactgagttccagttcttgattgagcataggcacctcccccaattttcatgcctgtattcaggctttttccagcgtacacagcaatggatgctcgttctccctcgcgtactgattcaccatagcgactttggtctccgccacttccgcggtaaacacgccacaaatcgccttaccttcatagtgaaccgtgagcatcagttgcgttgcacgttcaacatcataagaaaagaatttttgtaacacgtcaataacaaactccatcggagtgtagtcatcattgaccaatatcactttatacatagatggcggtttaatcgcatcacgaacttcgtcgtcaaccaggtgctcgaagtccagccaatctctcttactcatcgtcagtgttcatcatcggttgctgttgccaacaggcggaggcctgtcgatgaccagaggttatgctcatcacaaatctacaatagatcatagataactatcatctatcgcttctatccgcgacggctgtcacattccccggcaatagcgttaactgcttcaaattttgacgcatttttcgccgttccccctcctcaatcgcttgacgcgttttcgtatttctctaaattgtagtggcgagagttggcgagcaattgaacaactcgtcactccaccaccggttcattccatcttactaataaagatttacgaaggatgtcgaagtatggaaatgggtactgttaagtggttcaacaatgccaaagggttcggttttatctgccctgagggcggcggcgaagacattttcgcccattactccaccatccagatggatggttacagaacgctaaaagccggacaagccgttcggtttgatgttcaccaggggccaaaaggcaatcacgccagcgtgatcgtccctgtggaagcggaaacggctgcataactcttttgcttcattgtgtacatcctgctaataaaatgccagtccttctgactggcatttttatttctcgccccgcctattctcgcgccagggcatccaccggatcgagccgcgccgcgttgcgcgcaggcagccaaccaaacagcaccccggtcagcgtcgaacagagaaacgccgtcagcagcgccagcggagaaaaaccaatctcccagccggggagaaacagctgtaaaataaaggcgatcatcagcgacaatgctacgcccagcgcgccaccgaccaggcaaaccagcaccgcttcaatgagaaactgctgcagcacatcgctggcccgggcgccaaccgccatgcggatgccgatctcccgggttcgttcggtcaccgacaccagcataatattcattacgccaatcccgccgaccaccagggcaatcaccgccaccaatgtcaggaacagctgtaaggtatgtgtggtcctttcggcggttttcaagacgctgtccatattccaggtgaatacatcttttttaccatgccgcagctccagcagacgcagcagctgtttctctgcggtttcactgtcgtagccttcatgaacgcgcacagtgatggagttcagccacgactgacccattactcttcccgccatggtggtgtagggcaaccagacgcggagaattttgctgctgccgaacatcgactgcttttcatccgcaacgccaatcaccgtggccggcatattgcccaccagaatcacctctcccaccactttcgctttattgggaaacagctgccgacgggtattgctgtcgagcactaccacctgtgcccgactgttgagctgcagttcattgaaggtattgccttcgctaaaggtcatgccgtagacattaaaatactgtggaccgaccccctccgcactggcggcaacgtcaatattgttggcgcgcaggcgcaggctttttgaaaccgccggcgtggcggagcgcacccacggctgcttctggatcgccagcaaatcgtcatacttcagcgcctgctgatagcgcgggtcgtcgtcgccaaaatccttaccaggatacacatcaatggtattggtgccgatggcgcgaatatctgccagcaccatctgcttggcggcatcccccaccaccacgatcgacaccaccgaggcaataccgataataatgccgagcatggtcagcagggtacgcattttattcgccgccatcgctctccaggccatcaccagcgcttcgcgaaagccgctggtaaactgacgccacgccgaaggctccgcctgcggacgggcgcgcagtccgccgccctggcgactggcgggcgggttgcggacgatctcgccatcgcggatctcgacgatccgctccgcctgagcggcgacctgcggatcgtgggtcacaatgatgaccgtgtgcccctgcgcttttagctggtgcaggatcgccattacctcttcgccggaatggctgtccagcgcgccggtcggttcatcagcgaggatcacctccccgccattcatcagggcgcgggcgatactgacccgctgctgctgaccgccggacaactgtgagggttgatagtcggcgcgctcgcccagccccagccgcaacagcagctcatgagcgcgcgccaggcgcgcgcgccgttcactgccggcatacaccgccggcacttcgacattctgcgcggcggtcagatgggacagcagatggtagcgttgaaagataaagccaaagtgttcccgccgcagacgggccagcgcatcgccatccagctgcgcgatatcggttcccgccacccgataggtgccgctggtgggtttgtcgaggcagccaaggatattcatcagcgtcgattttcccgagccggaggccccgacgatcgccaccatctcacccgcatggatgctgagggtgatccccttcaggacctcaacgctgccgtcgccggaaggatagctgcgacgtatatctcgcagctcaagcagcgccgtcattttgccgccccgctcgcgctctcgccgacgatcacttcgtcgccctcttccagaccttgcaccactgcgacgtcggtatcattgcgggcgccaatgataacctcacgctctttgacctcaccggtgcgcaacagtcgaacgtggtagcggttatcgcctaccgcgtcgcccagggcgctcagcgggatagtaatcacgttcttcacctcagccagctgaatgtgcacctgcgcggtcatgtcgaggcgcaggatcccctgcgggttcggtacctcgaagcgggcataatagaagatggcgtcattcactttttccggcgtcggcagaatgtctttcagtttaccttcataacgggtaagcgggtcgcccagcacggtaaaccacgctttttgccccggtctgaggtggatgacatccgcttcagagacctgcgctttaaccagcatggtgctgagatccgccagcgtcagaatgttaggcgcctgctgggcggcgatcactgtctgtccctgcagggtggtaatttgcgtcacttcgccggccatcggcgccaggatccgcgtgtaatcgaggttggtcttcgccgtatcgagcgtcgcctggttacgctttatttgcgcttcaatagtgccgatctgcgcctgtttcaccgccaaatcggtggccgcggtatcaaggtcctgccgcgagaccagctggcgctgcgccagctgctgctgacgggccagagtcacttgcgccagtttgctctccgcgcgcgcctgattgagctgggcgcgcagctccatgagcgtcgcttccacctctttaatctggttttgcgcctgctccggatcgataacccccagcaactgatcctttttaaccttatcgccaatattgacgtgcagcgttttcagctgtccgctgacctgggcgccgacgtcaacttttcgcagggcatccagtttgccggtggccagcacgctctgctggagatcccctttgcgaactaccagcgtctggtagctcggcagcggcgcattgaggatccgccatccccagatagccagccccagcacaacgatcgccaacagccaccagacggtcctgcgttttcccttcactttcatattccgattcctgctgtttccctgccgctccaggcggtgattctatcgaaacccgttggcaacaggacacccatttttcgcgtcaatgaggttttgtttagctgccggagagctttgtgccgccgtaaatgacgacggcggtgagattaatcggcacgaccgcgggctagccacagcacccgtgagaacattttcttcagcagcgtcggcacagcgtccacgccacggcggccggcctccatcgccacctcaatcgccaggtccggcttggatgagcgatggatggctttggtgatcacccgccgcatattcatcgggacattatccgggatctgcgccacccgatgataaacgtcatcaaatccctgacgatacataaagtgttccatatccagcgccggcagactggtcagatggtcgcgctccagctcgcgatcgttattgagcagacctcgtaccgtcgcggcatattttttccccgcctcatcgccgtccaccagcacgtgccactggatccccatccggcgggcaaacttgatcaatggcttcaggccggactgggcgaattcgatcaccttaaccccttcagcatcaaaatgatgaccgcactgccgggccagttcgttgataacccaggtttccgtctctccctccaccagcagccagcagcgggcgaagagcgatgaggcgcgattgaagcgaatgtgaaaagcaatgcgccggctctcttcggcattcattccacccggccccaaccgccacgccgatacccgcgtcgactcacgcaccagtcggcagacctgctctaccggcgtcagggacagcagctctccggagttggtggtggtcacacgctgcagcggcaacaaattcagcaggtgccaggcgacggaaagcatgattggatgcagacgggtctcgggatcttcaatcaacagcagcggtcgcgcgtcgcgatcgaggcgcaccgtccctttcgcctgcaggagggtggcaaacagccccagcaggatcacccgatggctgcgcccgccgggcttgtcgatcatccggttgataatatccagataacgccaactgcgctgttcatcatgggagcgccgccgcatcaggcgatgccgcgtctgagcgctgctttgctcggcaaagtaatgctcaagcagttgcaccatggccgatagcccctgacggatctgaccgtccgataaattttgcggatggctgaccagttcgcgggagagaaaatccagctgacgggcggtgatctctatctgcggcgagtgcggtaccgtcccgttatggatgcggcgcataaagcgcgcatcgcgcaggcgcagcaccggcatcaaacgcaccaggtgtcgggccagctcatcaatctcctccagcaccaacgcttcgccttcaccatcgataaagctccgcagggtcatcacgctgtcatcttcggcgagctcgccctccaggcgatagaacacccggtgatacccgtcatcgcatggcacccagcagcgctgaagcggacggaaacgccggacccgatggcggcctggctccgtttcgcggaaggtcaggataatatgcaaatggtgttcgcgcccctggatgtcgcccgggggaaaccagaaatcatcgcgaacaaagtgataaagatcgaactccggcgacaaaagcagggtcagcgcatcaagcagactggacttcccccacgcgttctccccgatcaggacgttattttgctccagcatcaacgacaaacgattgataccgcgaaaaccgacgatttctacgcgctcaagaagcatatcccctccgctacaccaccactctccttcagtaatcaacagtatagcgagggcggaggcaagatgacactctgcttaatcgcatccgtggctcatattcagcggattaaatatattcataaaattactcacttatcgcctattaccggccgttgattattcatcaaacaaaatagttttatttcaggcgttatgatctacactattgataatcttccatggataaaggaaaggctaaactggcaaaaggaatccactcaccttgccctaaatcaaataatatcaatatatttaactggctccgggatggcgattatctctagaataacgccgctttatttttatcgtcatcccttatcacgataaataaagaccggcacggtccgctcgtgcgcgtaaacaatttaattgaggtggttatgttcagaaaattagcagccgaatgcttcggcaccttctggcttgtatttggcggctgcggtagcgccgtgctcgccgcggctttccccgagctgggtattggttttgccggcgtcgcgctggcatttggcttaacggtattaaccatggcgtttgcggtcggccatatttccggggggcatttcaacccggcggtcaccttaggcctgtgggccggcggccgttttccggcaaaagaggtcattggctatattatcgctcaggtggtcggcggaattattgccgcggcggtgctgtacgtggttgccagcggtaaagccggctttgatgccgccgccagcggcttcgcctccaacggctatggcgaacactccccgggcggcttctccatgctgtcggctatcgtcattgaaattgtcctgacctgcggcttcctgctggttattcatggcgcgaccgataaacatgcgccggcgggctttgcccccatcgccatcggcctggcgctgaccctcatccatttgatcagcattccagtcaccaatacctcggtcaacccggcgcgcagcaccgcggtggcaattttccagggcggctgggcgctgcagcagctgtggctgttctgggtcatgccaatcgtcggtgggatcctcggcggcgtgctgtatcgcaccctgctggaaaaacgcgattaacgcttttcaaagcccgggtctccgggctttttctttctggcgacagctttactcggcccggtgatttgggtagtgtcatgggcgctattctcatcatgcaagggctgcatcgttcatgttttcgggactctttattattctgttgccgctggtcgtcggctatttactgcctcttcgtcactcctccgcgctaaagctgataaaccgcatgctcagctggattgtctatgtaatccttttttttatgggtatcagcctggcgttcctcgacaatctggccagcaacctgctggcaatattgcattacgccgcggtgagcgtggttatcattttactgtgtaatatcgccgccctgctgtggctggaaagtaaaatgccatggcgcagtcagcatcgtcaggagaaattaccctcgcgcctggccatggccctggaatcgctgcagctgtgcggtgtggtcgtgctcggttttctgctcggtctgaccagactgccttttttacagcacgcgacagaagccagcgaatatacgttgatttttctcctgttcctcgtcggtatccaattacgcaataatggaatgagtctgcgacaaatagtccttaaccgccggggaatgatcgtcgccgtggtggttacggccagttcattactcggcgggatacttaacgcctttattctcggtctgccgttaaagaccggtctggcaatggccagcggtttcggctggtattcgctctccggtattttactcaccgaatcctttggcccggtcatcggtagcgcggcgttctttaacgatctctgtcgcgagctgctggccatcatgttaattccgggccttgttcgccgcagccgctccacggcgctggggctgtgcggcgccacctcgatggacttcaccttaccggtactgcagcgttccggcggcgtcgaaatcgtccctgccgccatcgtgcacggttttctgcttagtttgctggtcccgatcctgatcgccttttttaccgcctgagcacccgctggcggcagccctcctgccgccaaatttgcgctaaatcaatctccctttaagttgtctgagaaataccttttcacccgttgccgcgcggcataaccttaaacatgtatatcaaatataactttaaaggtgtgaccatgttttgtgtgcaatgtgaacaaaccattcgtaccccagccggcaacggctgctcttacgcgcaggggatgtgcggtaaaacagcggaaacctcggacctgcaggatctgctgattgcgtcactgcaaggcctgtccgcctgggcgcttaaagcgcgcgaatatggcattatcgatcatcaggtcgacagctttgccccccgcgccttcttctccaccctgactaacgttaacttcgattccccgcgcatcgtcggctacgcccgccaggcaattgccttgcgtgaggcgctgaaagcgcaatgcctggcgatcgatgccagcgccgcggtcgacagcccggtcgccgacctgcagctggtcagcgacgatctgggcgacctgcagcgtcaggcggcggactataccccgaataaagataaagccgccatcggcgaaaatattctcggtctgcgcctgctgtgcctgtacggtctgaagggtgcggcggcctatatggagcacgcccacgtgctcggccagtacgacaacgctatctatgcccagtaccataaaatcatggcatggcttggcacctggcctgcggatatgaatgcgctgctcgaatgttcgatggaaatcggccagatgaacttcaaagtgatgagcatcctcgacgccggtgaaacgaccaaatacggccatccgacgccgactcaggtcaacgttaaagccaccgaagggaagtgcatcctgatctccggccacgatctgaaggatctgtataacctgctggagcagacggaaggcaccggcgtcaacgtctatactcatggcgaaatgctgccggctcacggctatccggagctgcgtaaattcaaacatctgattggcaactacggcagcggctggcaaaaccagcaggtggagttcgcccgcttcccgggccccatcgtgatgacctctaactgcatcatcgacccgaccgtcggcgcctacgacgatcgcatctggactcgcagcatcgtcggctggccgggtgtgaaccatctggaaggtgaagacttctccccggtcattgcccaggcgcagcagatggcgggcttcccgtacagcgaaatcccgcatctgatcaccgtcggctttggccgtcagaccctgcttggcgcggcggatacgctgatcgatctggtcagtcgtgaaaaactgcgccatatcttcctcgtcggcggctgcgacggcgcccgcggggagcgtaactacttcaccgatttcgccaccagcgtgccggatgactgcctgatcctgaccctggcctgtggtaaataccgcttcaacaaactggactttggcgatatcgaagggctgccgcgcctggtcgacgccgggcagtgtaatgacgcttactcggcgattattctggcggtcacgctggcggagaaactgggctgtggcgtcaacgatctgccactgtcgctggtgctctcctggttcgaacagaaagcgatcgtcatcctgctgacgctgctgtcgctgggtgtgaaaaacatcgtcaccggtccgacggcgcctggtttcttcaccccggatctgctggcggtcctcaatgagaagtttggtctgcgttccgtgaccaccgtggaacaagatatgcagcagctgctgagcgcttaaggagtccctgatgactatgccaacctcccagtgcccgtggcggatgcaggttcaccacattcaccaggaaaccccggacgtgtggaccctttcgctgctgtgccacgattactatccgtaccgcgctggccagtacgctctggttagcgtgcgtaactcggcggaaacgctgcgcgcctataccctctcctcgacgccgggggtcagcgaatacattacgctgaccgttcgccgtattgacgagggtacgggttcgcagtggttgacccgcgaggtcaaacgcggcgattacctttggctgtccgatgcgatgggcgagtttacctgcgacgataaagcggaagataaattcctgctgctggccgccggttgcggcgtgacaccgatcatggcgatgcgccgctggctggctaagcatcgaccgcaggccgacgtacaggtgatttataacgtgcgttcgccggaagatgtaatctttgccgaagagtggcgcaactacccggtcaccctggtagcggagcacaatgcgacgcacggttttgtcgccggccgtctgacccgggagctgctgcagagcgtgccggatttagccagccgcaccgtgatgacctgcggcccggcgccttatatggagaaggtcgagcaggatgttgccgccctgggcgtcacccgcttctttaaggaaaaattcttcaccccggtggctgaggccgccaccagcgggctgaaatttactaaactgcagccggcgcgcgagttttacgcgccggtgggcaccacgctgctcgacgcgctggagagcaataaagtgccggtgaccgtcgcctgccgtgccggcgtctgcggctgctgcaaaaccaaagtggtttccgggaagtacagcgtcaccagcaccatgacgctgaccgacgccgaaatcgccgacggctatgtgctggcctgctcctgtcatccgcagagcgatctggttctcgcctgaggtcaaaatccccggtggcgctaccgcttaccggggctacagcgctgtgcgatttggtagcccggagaaggcgcaatgcgccgcctccgggaaaatccctggcgacaataaacgctcaggcgacatgagataaacgctttcccggactgaaaaaattgcaaatcgccaacagtatcgactttacgccccaggacgaatgaggcatttttaccgccaggccgactgaccggccagcgaataacgccccgcgccgagtagcgcaatcgccagtgcgccaacaaagaaatagaccagattctcaatggcccacgctcccaccgtatcaagcgcaaacgtcttatctaagccgaccatcagccacgccaccaccatggtgaacgccagcaccaacgccgccgggcgggtcaggacgccgagaattaacaagcagggagcgaccacttcccccaccagcacaccgtaggcgataaacccgggcaatccctgcgccgccagcatcccgctaatgccatccacaccatctatcagcttatggattccatggaaaagcattaagccgccgacggcaagtcgtaacaagagtttaccggcgtcatcatgcgacagcctgcgatttactgtgtttaacaatcctttaaccatttgatgtgcatcctgttttgcatcctgtgtacttccagagtatgcgcagccggagaggaataaaaccagcaaaaaatcaggggtaatcggttacattgcggtcagtttcatctaagcttgaaggcgttatcaaaaaaaggagatggagatcatgaaacagaccgtggcggcatacattgccaaaacgctggaacaggccggcgtgaaacgtatctggggcgtcaccggagattccctcaatggattgagcgatagccttaaccgcatgggcaccatcgactggatgcccacccggcacgaagaggtcgccgctttcgccgctggcgcggaagcgcagctgaccggcgagctggcggtctgcgccggctcctgcggaccgggcaacttgcacctgattaacggtttgtttgactgtcatcgcaaccatgtcccggtgctggccatcgccgcccacatcccatccagcgaaatcggcagcggctattttcaggaaacccatcctcaggagctgttccgcgagtgcagccattactgcgaactggtctccacgccggagcagatcccgcaggtgctggcagtggcgatgcgtaaggcagtgattaaccgcggcgtctcggtggtggtgttgcccggcgatgtggcgctgaaggccgccccggaaagcgccagcagccactggtatcatgcgccgctgccgacggtcaccccggcggaagaagagctgcgcaagctggcgcagcttattcgctactccagcaatatcgcgctcatgtgcggcagcggttgcgccggcgcccaccaggaactggtggagttcgcagccaaaattaaagcccccatcgtccacgccctgcgcggcaaagagcacgtggagtacgacaacccgtacgatgtgggcatgaccgggctgattggcttctcctctggcttccacaccatgatgaacgccgataccctgatcctgctgggcacccagttcccctatcgcgccttctacccaaccgacgcgaaaattatccagatcgacatcaaccccggcagcatcggcgcacacagtaaggtcgacatggcgctggtgggcgatattaaatcgacgctgaaggcgctgctgccgctgctggaagagaaaaccgatcgccacttcctcgataaggcgctggagcactatcgcgacgcgcgaaaagggctcgacgatctggctaaacccagcgataaagccattcacccgcaatatctggcgcagcagatcagtcattttgccgatgaagatgccattttcacctgtgatgtcggcaccccgaccgtctgggcggcacgctatctcaaaatgaatggtaaacgccgcctgctgggctcgttcaaccacggctcaatggccaacgccatgccgcaggccatcggcgccaaggccactgcgccggagcggcaggtagtggccatgtgcggcgacggcgggttcagcatgctgatgggcgattttctgtcgctggcgcagatgaagctgccggtgaagattgtcatctttaacaacagcgtgctgggcttcgtggcgatggaaatgaaggccgggggctatctcaccgacggtacggagctccacgataccaacttcgcccgcatcgctgaggcctgcggtatcaaaggtatacgcgttgaaaaagcctccgaggtggatgaagcgctgcagaccgccttccgcaccgacggtccggtgctggtcgacgtcgtcgtcgccaaagaggaactggcgatcccgccgcagatcaagctggagcaggccaaaggctttagcctgtatatgctgcgggcgatcatcagcgggcgcggcgatgaggtcatcgaactggcgaaaaccaactggctcaggtaaaacagaagcaatacgttgaaccagaccaaggaaaagccgtgatcgatttacgcagtgataccgttacccgtcccgggcgcgccatgctggaggccatgatggccgccccggtcggggacgatgtgtatggcgacgaccctaccgtcaatgaactgcagcgctatgccgccgacctggccggcaaagaagcggcgctatttctacccaccggcacccaggccaacctcgttggcctgctcagccattgccagcgcggcgaagagtatatcgtcggccagggggcgcataactatctgtacgaagccggcggcgcggcggtcctcggcagtattcagccgcagccgatcgacgccgcggcggatggttcgctgccgctggataaagtggcggcgaaaatcaaacccgacgatatccattttgcccccacccgcctgctgagcctggaaaacacccataacggtaaggtgctgccgcgcgactatctgcaggaagcctgggcgtttacccgccagcgcaatctggcgctgcacgtcgacggcgcgcgcatctttaacgccgtggtggcctacggctgcgagttacgcgatatcgcccaatactgcgactccttcaccatctgcctgtcaaaggggcttggcgctccggtaggctcgctgctgctcggcagcgaggcgtacattcgccgcgccgtccgctggcggaaaatggtcggtggcgggatgcgccaggcgggcatcctggccgccgccgggctgtacgcgctgaaaaataacgtgcagcgcctgcaggaggatcatgacaacgccgcgtggatggcggagcagctgcgcgctatcggcgccgacgtcacccgtaacgataccaacatgctgttcgttcgcgtcggcgaagagcaggccccggcgctcggcaagtttatgcaggcgcagggggtattgattaacgcctcgcctgttgtccgtctggtcactcacctggatgtcaaccgtcagcagctgagcgaggtggtcgcccactggcaggcttttttacaacgctaaggagtcaggcgtgtcgcaatcagttctggtgctcggcgccagcggctatattggccagcatttagtgcgcgcattaagcgcgcggggctatccggtgctggcggcggcacgccatatcgaccgattgcaaaaactcgctttgcccggcgttacctgccggtcagtcgatctcaatcagccgcaggacctgcctgcgctactcaccggtatcgataccctttattatctggtccacggcatgggcgaaggcggtgattttatcgcccatgagcggcgggtggcgacgtatgtgcgcgatgccctgcgtcagtcatcagtgcgccaggtgatatttctcagttcgctgcaggccccggcgcaggagcaatccgaccatctgcgcgctcgtcagattaccggcgatctcctgcgtgagtcgggcgtgccggtgaccgagctgcgggccgggattatcgtcggcgccggctccgccgccttcgaggtgatgcgcgacatggtttataacctgccggtgctaacccctccgcgctgggtacgttcgcgtactacccctgtcgcgctggaaaacctgctcgttgacctggttgagctgctgaatcatccctccgatgcgcaccgcgtcttcgaagccgccggtccggaggtgttaagctatcagcagcagttcattcgctttatggccgtcagcggtaaacatcgcccgctcattcccattcccctgccgacgcgctggatctcggtgtggttcctcaatgtcatcacctcggtgccgccgaccatcgccaaggcgctgattcaggggctgaagcacgatctaatcgctgacgatcgggcgctgcgggcgctgatcccgcaaacgctgatccccttcgatcaggcggttcgccgcacgctgaaagaagaagagcagttagtaaactccagcgactggggctacgacgctcaggctttcgcccgctggcgaccggagtacggctactatccgaagcaggcaggttgcaccgtcgccactcaggcaagccgccaggccctgtggcaggtcgttaaccaaatcggcggtgaagaggggtattttttcggcaatctgctgtggaaaacccgcggcgcgatggatctgctggtcggccaccggctggccaaagggcggccgcagcgcgcttatctgcaaaccggcgatacggtcgacagctggaaggtaattatcgtggaggaagaaaaacagctcaccctgctattcggtatgaaagcgcccgggctgggccgattaagctttaccattaacgataaaggcgatcgtcgtgaactggacgtgcgcgcctggtggcacccgcacggtatgccaggcctgatctactggctgctgatgatcccggcgcacctgtttattttccgcggtatggcgcaacgcatcgcccggctggccgaacaaatctcaggcagagtcgaaggataagcgttattctttcatgattctcattgcatagtcgggagaatcacggaaaaatgcgcacgaaattcttttctgggacagtagagtgatatgaaggtactggttaccggtgcgaccagcggattaggccgcaacgcagtggaatatctgcgcaacaagggcatcagcgtgcgagcgaccgggcgcaacgaagcgatgggcaagcttctgagcaaaatgggggcggaattcatcccggcagatttaaccgagctggtctcttcgcaggctaaagtgatgctcgccggtatcgataccctatggcactgctccagctttacctcgccatggggcactcagcaggctttcgatctcgctaacgtccgcgccacccgtcgtctgggcgaatggtcagtggcatggggagtgcgcaatttcgtccatatctcttcgccatcgctctattttgattatcaccatcatcgtgatatccaggaagatttccgtccacaccgcttcgccaacgagtttgcccgcagcaaggcggccagcgaggaggtgatcaacctgctggcgcaggctaacccgcatacccgttttaccattctgcggccgcagagcctgtttgggccgcacgacaaagtctttatcccccggctggcgcaaatgatgcagcattatggcagcgtcctgctcccgcgcggcggcagcgcgctggtcgacatgacctattatgaaaacgccgtacatgcgatgtggctggcgagccagccggcctgcgatcatcttccctccgcccgcgcgtggaatatcagcaacggcgaaccgcgcaccttgcggagcatcgtgcagaaattgatcgacgagctcggtatcaaatgccggatccgctcagttccctatccgatgctggatattatcgcccgcagcatggagcgctttggcgataaaaccgccaaagaacccgcgtttacccactacggcgtctccaagcttaactttgattttacgctcgatatcacccgcgcgcaggacgagctgggctatcagccggtggtgacgcttgacgacggcatcgtgcgcaccgccgcctggcttcgcgaccacggtaaactacaccgctaaccctggccatatttttctaacagcgcctcggctatcgcttcggtttgcgcatccgctaccccatcccagcgctgcggacggaagtgcatctggaaggcgataatcacccgcttcttctgcgcgggggtcatctccggcgtcacctgatagccatagcgcgagagcaaatccagtacgatttcggggtccactggctcgctggccggccgcccgttcagataaaaggccacccgctgctcgtcaggccaggcgccgatcccctgctgcgccagctgttgccaggggaataacggccccggatcgtctttgcgctgcggggcgatatccgcatgggcgaccacattctgcggcgcgatgtggtagcgggcgatgatatcgcgcgccagcgggatcagagccgcaatctgttccggatgaaagggggtaaaacttttgacgcccgccgtcttctgccagccgcggttctccagctcaatgccaatggaggtatcgttaatgcgcgtactgccgcgccagtagcttaccccggcgtgccaggctaaatcctcttccggcaccagctgccagatccgcggtttatgctgataacgcgggggctgttcaggaattaaatagtgggagctgacctctttatcggtcaacgtagccagcgagacatcaaaattgtcagccgtatagtggatcactaacacctttattcgcggataggcagcctgcgccggatgacgggtgtccagctggtatccgtcgcgatcgataatgcccttttccccagcgcagccggtcagcagcagcgccagcagcacgatccgcatcatccgtttcatcccttctcccttgcccggcagcgtctccgggttaataagaccattgattacgtcctttatttttcgcctgatacagcgcactgtccgcccgggcgatcagcgtctctatcgggaccgtgccatcggaggcgacgatcccgatactcacggtgacctccgacgccaccgccgaagcggcgtgcggtaggcctgcctcgcggatcttctgctgaatgcgctcgacaatagcggtggcatgcgctaaggacaccccgggcaacacgacgacaaactcttcgccgccgtagcgagccaccagatcgccctccgcccggaccgccattttaagcacctgcgcgacagaagataagcactcatcaccagcctgatggccatagcgatcgttatagcgcttaaaataatcgacatcgatcatcatcagcgccagcggcgttttttgctgccagatcgccgccaggtaagcattgagcgcccgacggttagcggttccggttaaggcatcctggttggcgatactttccagccgctgaataagctgcatattctcctggtgggtatcccaggcttcgtcataccagcgctgcaaaatacgtcggccatacagcaaaatcgcggtaaaaatggcccagaggatcaaaaagcggatctcggtgtgatagtggagctgtattcccgccagcaaggcggtcacccatagcggcagcataaaagcggttatgccgggccaatggtgatacagcgcggtgaggccggtagtcattaatatcaccagcagcggccaggcaaagggcaaggtccagaaaaaaataaaacaataattactcagggaccagcacagactgagcgccagcagcagcccggtgatgatattcaacgtatatcgtccctgcgccagtcgcggcgtgagggcaataatcactaaaatggccgaaatgataataaccgcaatcaacgccgcttcgatataaggaataaccgcccggtgcgtcagtagcctcttatcaaaataggtaaagataaaattgcggaagaaaatcattaacgcaaaagcgatattgacaaaggccagccagggcatactcatggacagcgcatggcgctggacattatctctggtggcccacaacgcggctcgctgctgccgggcgcgctctcgcttatttgttaacatcttaactccctggtgacctgcatgaccatgggcgcagcccctgcttttctatatgataaaccatgttaccgggaatgtctgtcagcgcactatcccctcagctccggcctctcagggtgattttcagctaacgaccgaagaaaatagcctggtccgctcccgatgggtaaccggctcaaaaaacaagcatcagcactgcgaattacgtcatcttttcgctaaaaagcgttaactaaccgtcattaaattgcagcattttgcttacaaaaagcagtgtgagttcaatctgaaatcattcattggtgaatgcaaagaagagcatgatgatagcaagataaacagtaggggctaagaatattaaatatgcagctttagtggcaggtacagcattgttttaagcggccaatgccgtctccgcagaaattttaacaaaacagcttttgataaagtccatacgcaatataccaaaatcggcgccatttcctctactggtcaaaccgcatccaacgatgcccgtgaagagctgattaaaaaaacaaatgaacaaggggggcgtcattgtcccctcctccggtaatacggataaaaaaatgcacgtcgccactcgcatctataagaagaaataattacccttatctttcaagagccatttccctattttacggggtaatatttcttgttcacgggaaaattaagtttatttttatactgccctgccttttagcgcctgacggaattctgtcatccccgtgccgatttcccgccctaaggctgtagccacatcaaggtcttagctctttgcgtcaagtacaatccgcacgctatacgctatgctttaacggaaactgaaaacgtagttcgcttataaggaaatcatcatgcgctacaaactttttgctgtacttctcccttgcgcgctggcgctcagcgcctgtacgaccgtcaccccggcctataaagataatggcacccgcagcggcccctgcgtcgaaggcggccctgacgacgtagcgcaaaaattctacgacacccagatccagaatcgtactcaggatccggcggcgctgcgcccctatctgagcgacggcctggcgcagttactcaatgacgcccgccaggatcccgccaacagcaaattactgcaggctaatccgttctccagcagcagcaccccggcagacagcgccgtggtcgccagcgcctccaccatcccgaaccgcgatgcgcgcaatattccgctgcgcgtcgatctgaaacagggtacccagagctggaaagatgaagtgctgatgatccaggaaggccagtgctgggccgtcgatgacgttcgctatctcggcaacaacagccatgcgccagccgggacgctgcgacagagtctggagaaacgctgattccggagttgaagcgacgccgctgaaacgataaccccggtaaaatgtcggtattcgccccaggaatgccgacatttgcgcccccctcacccaacaggccatattttgtgctaactttaaagctaaacgtggtttagatttaacttttaacgcataaatattgcataactattctgccaaaggtagtatttgcggcctcaatagctattcgtatcagactgcccagatgagtattaaactaaacggcattaattgcttctacggcgcacaccaggcgctgttcgacatcacgctggattgcccgcagggggaaacgctggtgctgctcggccccagcggtgccgggaagagctcgctgctgcgcgtactcaacctgctggagatgccgcggtccggttcgttatccatcgccggtaaccaattcgacttcaccagagcgccgtccgataaagcgattcgcgagctgcgtcagaacgtcggcatggtctttcagcaatacaacctgtggccgcacctgacggtacagcagaacctgatcgaggccccctgccgcgtactggggttaagcaaggatcaggcgctggctcgcgcagagaagctgctggagcgcctgcgtctgaagccgtacagcgatcgttacccgctgcatttatccggcggccaacaacagcgggtggccatcgcccgcgcgctgatgatggagccgcaggttctgctgttcgatgagcctaccgcggcgctcgacccggaaatcactgcccagatcgtcagcatcatccgcgagctggctgaaaccggcattacccaggttatcgtcacccacgaagttgaagtggcgcgcaagacggccagccgggtggtgtatatggaaaatggccatatcgtcgagcaaggggatgcctcctgcttcacgcatccgcaaactgacgcgtttaaaaactatctttcacattgatgtttttcggggaaatgacgatgaaaaaagtactgattgccgccctgctcgcaggcatgagcctctccgcttccgccgcgcagaccattcgtttcgccaccgaggcctcttaccctccgtttgagctggtggacgccaacaaccagatcgtcggtttcgatgtcgatctggcgaacgcgttgtgtaaagagatcgacgccacctgtaccttcaccaaccaggcctttgacagcctgatcccgggactgaaattccgccgtttcgacgcggtcatggccgggatggacatcacgccggagcgtgaaaagcaggtgctgttctctaccccgtattatgacaactcggcactgttcgtcggccagcagggtaagttcaccagcattgaccagctgaagggcaaaaaagtgggcgtgcagaacggcaccacccaccagaaattcatcaccgataaacatccggaaatcactaccgtgccttacgacagctaccagaatgcgaagctggacctgcagaacggtcgtatcgacgcggtctttggtgacaccgccgtggtgaccgaatggctgaagagcaatccgaagctggcggccgtgggcgataaagtgaccgacaaagcctatttcggcaccgggctgggcattgccgtacgtcagggcaacaccgacctgcagcagaaatttaacgctgcgctggaaaaagtgaagaaagacggcacttaccagaccatctataacaaatggttccagaagtaagactgaatgaacgaaatttttccattagcaagcgccgccgggatgaccgtcggccttgccgtttgcgcgctcgtcatcggcctggtcctggcgatgctctttgcggtactggagtcagtgaaatggcgcccggtagcctggcttgcaaccggcatagtgaccatcctgcgcgggctaccggaaattctggtggtgctgtttatctatttcggctcttcccagctgctgctgacgctctctgacggtttcaccatcccgctcgggttcacgcagatcccggtgcagatgcagattgagaactttgacgtcagcccgttcctctgcggggcgatcgccctgtcgctgctgtacgccgcttacgcctcgcaaacgctgcgcggcgcgctgaaagcggttccgcagggccagtgggagtccggccaggcgctggggctgtcgaaagcggccatattcttccgtctggtgatgccgcagatgtggcgccatgccctgcccggcctcggtaaccagtggctggtgctgctgaaggacaccgcgctggtgagcctgatcagcgtcaacgatctgatgctgcagaccaaaagcatcgccacccgcactcaggaaccctttaactggtatatcattgcggcggcaatctatctcgtcatcaccctgttgagtcaatacatccttaagcggattgaccagcgtgcgacgcgcttcgaacggagaccaggctgatgctcgactatttacccgaactgctgaaaggactgcataccagcctgacgctgaccgtggcgtcgattatcgtggcgctgatcctgtcgctgatcctcaccattatcctgaccctgaagacgccggggctggtatggatagttcgcggctatatcaccttgtttaccggtacgccgctgctggtgcagatcttcctgatctactacggcccgggacagtttccttcgctgcaggagtatccgtggctgtggcatcttatctccgagccgtggctgtgcgccctgatcgctctgtcgctcaacagcgccgcctacaccactcagctgttttatggcgccatccgggcgatccccgacgggcaatggcagtcctgtagcgcgctgggaatgagtaaaaaggataccctggcgatcctgctgccgtacgcctttaagcgtgcgctatcgtcctattccaacgaagtggtgctggttttcaagagtacctctctggcctacaccatcacgctgatggaagtgatgggccacggccagctgctgtatggacgcacctacgacgtgatggtgttcggcgccgccgggattatctatctcatcgttaatggactgctgacgctgctgatgcgcctggtggaacgcaaagcgctggccttcgagcgacgtagttagcacctgagcatattgcataaaaagcaaacagcaaggcggacaagtctaacacctgtccgtctttttttatgacgataaaaatacttaatcatttttattgcatataaattcatttaatggcattgtcactctataccgcagacacggtgaataatcataagatagacagacgggagttccacgatgaaaaagttagttctggctgcactgctcacctctttcgcgttcggcgccgctgccgcggaaaaaatcagctttggcgtctccgcaacctatccgccgtttgaatcgatggacgctaataaccagattgtcggctttgatatcgatctggcccacgcgctgtgcaaacaaatgcaggcagaatgtacctttaccaaccacgcgtttgacagcctgatcccggcgctgaagttcaagaaatatgatgcggtgatttccggaatggatattacgccggagcggagcaagcaggtggccttcaccgacccgtactacgccaactcggcgctggtgatcgccaaaaaagatgcgttccattctttcgatgacctgaaaggcaaacggatcggcatggaaaacggcaccacccaccagaaatatctgcaggataagcatcctgaggtgaagaccgtcgcctatgacagctaccagaatgcgattatcgatttgaaaaatggccgtatcgacggcgtgttcggcgacaccgcggtggtcaacgaatggctgaaaactaacccgcagctgggggcagccacgccgaaagtgaccgacccgcaatacttcggcaccggactcggcattgccgtgcgcccggataacaaggcgctgctggagaaactgaacgccgcgctgaaagcgattaaggccgacggtacctaccagaaaattagcaaccagtggttcccggagtaacttttttcgccgggtggcgctgcgcttacccggccaccgctcttccacgttggccgggtaaggcgtagccgccacccggcgatttctcaaagtggcacgaagaacctgaaccgcgccccgcttaccgactccaccagtctgatatcgcccccgtgcagttccagcattcgtttcacaatcagcagtcctaacccgccgcgatcctcccgcgatgcctgggtagacaacgccgacggccgctggaacagatcgtcgcgcagcgcggcatcgacgcccgctccgttgtctgccacttcgacctgaagctgttgattctcctgccagaccgccagacggatctccccgccgacgggagtatgccgcatcgcgttatcgagcagattggtcaccaccctctcaatcatcgacacatcggcgttaatcagcggcagcggtcccggtacatcaatatgcaggttcacctcgcgtgtgcgggcagttaattcaaacttctgcgccacgtcggaaatcagctcccccatcgcgaaacgctcgcgctgcggcttaatgccgccatgctccagtcgcgccagctcaaacagctgctgcgaaagatggcgcactttgttgccctggcgcagggcgatggtgagatactgcctgcgctcctcggcggtcagccattcatccttcagggtcagcgtttccagataccccagcagcgaagtcagcggcgtgcgcaaatcgtgagagatattggccacaaattcacggcgctggcgatcgctgtcggccagccgatcccactgatcggcaatctgccgggcaaggtcaataaagcggttctcgagcaccgccacctcgttaccaggccggggctccggcctgcgggccgccagggttttgatggcgctgatgctgtcctggccgctcgccgccacctgggcggtgagcaggcggaccggccgggtgacccagaaccatgccagcccccctgccagcaggccaaacagggccaccagcagcagcgtccacagaacaatgctccacagcgttttttgccaggcgtcggccgccagctgattaaacgtctccccctgcaaaatgatatacaggtagccgcgcagttggccgtcgacgcgcagcggggcggcgctgaagacttttcgtccgtcgggactgcgcggatcgtcgccatacaccggcgacgcactgccggtgagaaaagcctgcaccggcgccatgtcgatacgctggcgctggatatggcccggcggcgccgcatcggccagcaggtcgccatccggcgacagcagatagagctccacgctgggattaaaggtcatcagtcggtcaaacagcgatttcagggtttgccggttgacctcgccgtgggcgtccagcaacggctcgcgggcgacaatctgttgagccagcccggacgacagacgctgcaccatggcgttgccatactgcgcgctgctgtgtaactggacggcgcataccgccaccgcgcatagcatcagcagggaaaccaccaccagcgccagccgctggctgaggctcaggcggcggatcacggggcggcctcttgcgtcaccggggcgaacttatagccttttccccagacggtaagaatgatgtccggctcggccgggtcacgttcgattttactgcgcaggcggttgatatgggtattgacggtatgctcatagccctcgtgctgatatccccagacctgctccagcagcgccaggcgggaaaacacttccccggggtggcgggcgaagtaatacagcaggtcgaattcacgcggcgtgaggtccaccgtctcgccgcgcagcttcacttcgcgcgacagcgggtcgatgctcaggccatggcaggacaggcgcccggcgtccatcagcagattctgccccatcgcctcctggcgacgaaacagcgctttgacgcgggcgataagctccagcaatgaaaagggcttcgccagatagtcgtcggcgcccatctccaggcccagcacgcggtgcatttcgctggtgcgagcgctgatgataatcaccggcaggtagcgggtcatctggcggatacgccggcagatctccagaccatcgacgccgggcagcatcaaatcgaggatcaccgcatcccagacctgcgtctccagccgggcgagggcctggccgccgtcggcttcatggacgatctgatagccctcatcctgaagattgagccgcagcagcgtggctatatcctcgtcatcttccaccagcagaatggttttggccattagattccccccaccaataacaaaacatgctgcatcaagcttacccgatttcagcggcgcaaagccttcacattttgtttaaacttcgcggaccagcagggtcagcacttcgtagtgggcggtgtgggggaacatatcaaacagctggacccgctcaacgcgatagccgctaagacgagcgatatcggtcgccatggtacgggcgttacagctggaatagataatatagggcggcgccatgcggcttaaatagtcgcatagttcagcgccaataccgcggcgcggcgggttaaccagcaccagctgcggggcatccgcttcgtgagtggcgaactgcgtggagtccagcgcctgaaaatgcagattgctgagccccagctgcgcggctgactgtctggcgcaggcgatggcttccggggcgatctcgataccggtcaggcgcatcgtcggcgtcgcgcaatgcaggccaaatcccccaacgccgcaaaacagatcccacatatgctggaccggcagcgcgcgcacccagtcgcgggccgtggcgtacagccggctggctaccgccggattggtctgaaagaagctttgcgggcggatccacagcggcacctcattaaagacctcccccagcgcctgctgttcggtgaagaagatctcctgctcgccttccatgattgccatatgcaccggctggatattcgccgtaatcacgctgagctgcggcagctgtgcctgtagccacggcagcgcagcgcgcagctgagccaccttggcctctgagcgcagcacgaagcgcagcatcatctccccctgctggctggcggtcagcagcaggtatttcagctccccgcgtttgcgcgcgacgttgtaaggtgttaacccggcgcgggcgataaagggcttcagggcagcaaaaaccggggcaaactcggcgggatagagcgggcagtcggtgaggtccaccggagtgccatcgcggtgcagcatccccagcagcggacgctcaacgctgccgctgaccaccattttagccttgttacggaaagccgcctccggcccgctgaccggctcgccccaggctgcgaccgggatcgccgccagcagcgtgcgcagatcggccattttatcggcgagctgttgcgggaccggccgctccagccattgacaggagcggcagcggccggcgtcgtagagtgcgcaatgcataattgaccttcaaaaatccaggggcggggattgtatcaccgttattgcaggcggaaaaagcgacggcaattcgccggcacgaacagcagcgtcagaaccagcagatccggcagtttttgcatcaccagcgagtggaaaatttctcgttttgattccccgggaatgctgaacagctccggatacccgtagcccagcgacgccgcccacaggtagccggcagcgataatctgcgtcagcagatagatccagcgcgcccagttgcgccctttcaccagcgagaaggcgcaccagatctcgataaacaccagcgccaggctgccgaggaagaccagcgtcaggttccaggtctgaacgctgcggtgtatgaattcgttcagcccctgcaggcccaacagattaaggatcatcagcagatccaggccacgaatcaaaataatagcaaaggccgccacctgcaccagcgcagggacgttaaggcgggcatgcgatgagcgagttttcgtaaacaatcccaacgtaatgtcttccatgaaaacggcgccacagggtggcgccgaccggaggctgctgtaccgattttaggtggttcagccttgtcttgcacgctggatatcgcgcactcgctgcttttctgcgcgggccatcaaataccaggcgataaaaccaacaataccgaccacgccgaggatgagagtcgccagggcgttgatctccgggtttacccccatgcgcacgctggagaagaccagcatcggcaaggtcgtggccccgggaccggagacaaagctggcgatcaccaggtcatccagcgacagcgtgaaggccagcagccagccggagatcaccgccggcataatcatcggcagcgtgatgacgaagaagaccttcagcggcgcggcgccaagatccatcgccgcctcttcaatagagtggtccagctcgcgcaggcgcgaggagatcaccaccgccacgtaggcggtacagaaggtgacatgcgcaagccagatggtcaacatgccgcggtccgacggccagccgatggcatgtcccagcgccacgaacagcagcagcagcgagagaccggtgatcacgtccggcatgaccagcggcgcggtgatcataaacgcgaagccgttggagccgcgaaaacgcccaaagcgcaccatcaccaccgcggcgatggtaccgaggatcgccgccgccgtcgccgcgcaggcggcgatggtcaggctcaatcctaccgcgctcatcatcgcatcatcgtggaacagttcgctataccagcgcgtcgaccatccggcccagaccgttaccagcttcgagctgttgaacgagtagatcaccagcatcagcatcggggcgtagaggaaggtgaacccgagcacgaggatcagaatgcgccacggcgagcgtactaccggcaagtcgttcatccctgctctcccatctgtttttgctggtgcttgtggaaccacatgatcggcacgatcagcaacagcagcatgacaatcgccaccgccgaggcgaccggccagtcgcggttgttaaagaactcctgccacagcacgcggccaatcatgatgctgtccggcccgcccagcagttccgggatcacgaactcgccgaccgccgggataaacaccagcatggagccggcgataatgccgcctttggtgagcgggacgatcacctggaagaaggtcttcagcggccgggcgccgagatccagcgaggcctccaccagcgaatagtcgatgcgggtcagcgcggtgtagataggcagcaccataaacggcagataggcatacacgataccgatgtacaccgccaggttggtgtgcaggatctccagcggctgatcgataacccctaaccacagcaggaagttattcaacaccccgttgctcttcagcagccccatccaggcatagacgcggatcaaaaacgaggtccacgacgggaggatcaccaacagcagcagaatattacgcgtcgacggcttgctgtgcgccaccgcccaggccagcggatagcccagcagcaggcagcagatcgtcgagatacccgccacctgcagcgactggagataagcttcaaaatagagcggatcgtcagtcaactgtaggaagttggcaaagttaagcgtcagcgtcagctggccgtccgcccactccatcagctcggtgtagggagggatcgcccgcgccatctcggcaagacttatcttgaacacgatcaggaacggtagcataaacaacaggatcagccacagatagggcagcgcaatcaccagcttgcggccatgcgccatctgcaggcgcgccgcccacagcgcgaagccgcccggttttttcgcccctgacggggattcaacggtattcatcgccctctcctcacaccgtcagcacaacgcagctgtcagcatcccagcataaacgcacctcatcgccccaggtgggcgtccctttccgatggcggtgttcattctgcagctgggcgctgatcatctgcccgctttgcaggcgcacatgatagatagagagatcccccagataggcgatatgaatcacctcgccgacggcaaaattgtagccgtccgccggcggttcatcgcacagcatgatcttctccggacgcagcgccacccagaccggcacgttgtccaccaccgaggcgtcggggtcgaccttcagcggatgcatcagtcccggggagcttagcaccagaccgtcttccagacgctccttcaccagcccttcaaagacgttcaccgagccgataaactcggcgctgtagcgggtggtcgggtgctcgtaaatctcttccggttcgccaatctgcacaaacttgccgcgattcatgatggcgatacggcccgccatggtcatcgcctcttcctgatcgtgggtcaccatcacgcaggtcacgccaacgcgctcaagaatatccaccacctcgagctgcatgcgatcgcgcagctttttatccagcgcccccatcggttcatcaagcagcagcagcttgggccgtttcgccaggctgcgcgccaacgcgacgcgctgccgctggccgcctgagagttggtgcggcttacgtttggcaaactcctgcatatgtaccagggccagcatctcctgcacccgggcggtgatttccgccttaggcaggcggtcctgcttcaggccgaaggcaatattctgctcaacggtcatatggggaaacagggcataggactggaacatcatattaataggccgctgatagggcggcacgcgcgccagatccacgccgtcgagcataatctgcccggcggtcggttgttcaaagcccgccagcatgcgcagcagcgtcgatttcccgcagcctgacgcgcccagcagagcaaaaatttcgcctttgtagatagtgagactgacgtcgtcgaccgcatgctggccatcaaacgacttggttaagttacggatttccagtagcggggtcagcgctttgggggctttcgcctgtgggcggggcattacgtcgttcaatcgggtgctctccggcaaaaaaacgatcaccatatggtccggtgccatacttcgtgcttaacagtgcatttgcaccatcctggtgcttctgctcgccgggcgcgctgctatttcccggcgagtgcagatctgatttggcccgtgttcgacgggccatcaggaattatttgccgctcttcactttggtccacgcgcgggtgcgcacgcggtcaatcttcggatcctgcaccttcagcgtgaacagtttggcgaacacatccgctggcggataaatcgccgggttgttacggatagtctcgctgaccagcggcgtggaagccttgttgccgttggcgtagaacacctggtcgctgattttggcgatgacgtccggacgcatcagatagttaaggaactgataggcttcatctttattcttcgcgtcggccggcatggcaaagacgtcaaagaacgccagcgcgccttccttcggaataaagtaggagacattgacgccgttcttcgcctctttcgcgcggttggccgcctgccagacgtcccctgcccagccgatcgccacgcagatgtcgccattggcaaggtcgttaatatattgcgaagagtggaagtagcgaatgttcggccgcagcttcagcagcagatcggtcgccgggccggtgtaatcatccgctttgctgctgttcggatctttgccgaggtagttcagcacggtagcgaaaatctcttccggcgcgtcgaggaaggagacgccgcagcttttcagtttttcgaggttctccggcttcagcaccagatcccagctgtccaccggcgcatctttgccgagaacggctttcaccttatccacgttgtagccaatgcccgtcgtcgcccacaggtaaggcatggcgtatttattctccgggtcatgcttggcgaccagcttcagcacttcggggtcaaggttcttccagttgggcagcttacttttatccagcggctggaacacgcccgccgccagctggcgttcgaggaagcttgccgacggcaccaccaggtcgaaaccggtgctacccgccattaatttgccttccagtacttcgttggaatcaaaaacgtcatacaccactttaatcccggtctctttttcgaaattcgctaccgtgtccggcgcgatataatcagaccagttataaacatgcagggttttttgttcggcggcgagcgaaccggcagagacggccatcagcgcacccgtaaccagacctgttaaccattttttaccaaaggcggtcatatctcttttccttctcaacgcccgttaacttacgggctcaaatatacgcatttctacgcatgcaaaaatcatgcatattttttcattgcctgagaaaaggagagcggatctctcccggagtggttgctcgcaactggaagcatcgccagaataactgtagccagaataagaggctatagcccaggtaaaaaaacgccttttatcaaatttttatgcaataacggtctacgtgataagccaaaacggcctgaatggcggtgaataatgctttaaagaaaggttaaatgcagaataaaagcgggtaatacgcagccgctgcggtagtggctgcgctaattttaggcaggtttagtgaagaaaatggtattgcacgttttccgccgcaggctcttcttcttcgcctttgtacagcagctgatttgcgccggcttcgaggattaccatcgagatctgctcttcgctttggcggaagaaccaggcgaactgctccatggtcacccctgggccgatagacagcgactggcaaaccaccagcttgggcaaattatcgtcctgaatgtcgataaacgccttcacggttaacgagctggcgttgatggccgagagatccgccgacagcgccagcagggcagacggcttcacctccgccagggcggaaaagagcaccacgttgtccaccaggtcaattttggcatcaaaaataccgtcgaaattctgcatatgcggcaggtgcaatgcctgacaggaatcgcactcaaaaaagctgatgccgatttcgtccagccagcgacgtagcgtatccagacctggaacgaccagtgaatccatagtgcctgtgacctcttacagtggaaaaacgacgccatagcttacgcaaaaaaagcgccgcataccatggccgtcttgcatccggcggttagccgcctattttcaaacagaattccggcgtcgcctggcgctcgatccaggcgatcatcttgccggcgacatccacgccggtggtggtttccaccccttccagccccggcgaggcattcacctccatcaccagcggcccgcgggcggcgcgtaaaatatcgacaccggcggcgtccagcccgagagtttgcgttgccttgatggcaatggcccgctcctcgtcgctaatctgcgccaccgtggccatgccgccgcggtgcaggttagagcggaaatccccctctttcgcccgccgctcgatcgccgccaccacctcattgccgaccaccaggcagcggatatcgcaccctttcgcttcggcaatgtattcctgcaccagaatatgagcgttcagtccgcgaaaggcgtcgatcacgctctccgccgcctggcgggtctccgccagcaccacgccgatcccctgggtgccctccaccagcttcaccaccagcggcgcgccgcccaccatggcgatcagatcgctggtgtcatccggagagtgagcgatgccggtcaatggcagatcgatgccctggcgcgccagcagctgcagcgagcgcagcttatcgcgagcgcgggtgatggcgaccgactcattcagcggatagcttcccaggagctcaaactggcgcagggccgcggtgccatagtaggtgatcgccgagccaatgcgcgggatcaccgcatcaaagtgcggcagctgacgccctttgtagtggatcgacgaggccaccgggctgacgttcatataacaggaaagcggatcgaggatctcgatctgatgaccgcgctgttgcgctgcttcgcgcaggcgccgacatgaataaagcgttccatcccgggataatatggcaattttcatcctgcacctctgcgaaaagacccgctctggcgggcctcagctatcgaacacactttcacctttcctgcggccggcggcggatatcacctggccggagcagcagtgtacacgtaatcagcgcgttgcccacccctgcttatgcagatagtcaagaataaacggacgactctctttcacgatagtgcgccggatatggtcgctccaggtatcgcggcgggcgttgctgctgcgcgacagataatagtgcgccagctgttcgtcatactccgccagcagcgcgttatccagcggctgatagcggttctcatgcaccagcatggccgccggcatccgcggcttgatatccgggttatccgccggccagccaaggcaaagaccgaacagcggcaggacgtgctgcggcagctccagcagctctgtgacggcctcaatgctgttgcgcaacccgccgatatagacgccccctagtccgagggactcggcggcggtcagcgcgttttgcgccagcagcgccgtatcgacaacgccgatcagcagctgttccgccagccccagctgcgcctgcggacagatctgcaggtggcgattaaagtcggcgcagaagacccaaaactccgccgcctgggcgacgtgctgctggccgccggtcagcgggaccagacgttcacgcagggccgggtcagtaatacggatgatggaggtgcactgtaaaaaactcgaggtagatgccgcttgcgcgctggcgataatcgccgcgcgctgttcgtcgctcacgggcgcatcggtgaagtggcggatagaacggtggctgcgcagcagctcaatggtcggcgtcatttcgtttttctctgtcagacaaggattcaggcttaggagagtgcgttaactgcggggccacgatctgcgccacccgccacatcacgacgagggcggcggggatcatcagcacgatcccggcaaagagcatcaccagcgccgcggtcgggctggcaatgggcgcaggcagctggacatactggttaagggagagccaggcgagggttaacagccccatcccgaggatctcaaccagcagaatgcttttcggcaatggggcaaattttcgcatcacgcctctccggttgataaacgcggcgcgccagccaattccaccgcgccgtcgggccagtatacgggttttgacagtccgacatttatcaaacatagccgtaaaccatcgaagtaaaaggcagaaccttctttccctccccgcccgttgcaggcatcataagcgccattcgccatccggctgaggtttaaggagagaagcaatgtttaccgttatttttggtcgtccaggctgcccttactgcgttcgcgctaaagaactggcagaaaaactgaccaacgagcgtgatgatttcaactaccgctacgtggatattcatgccgaaggcatcagcaaagctgacctggaaaaaaccgttggcaaaccggttgaaaccgtgccgcagattttcgtcgaccagaaacacatcggcggctgcactgattttgaagcctgggcaaaagagaatctcggcctgtttgcctgagtcaatttatttgctcgatgaatgactgcgccaggtatcaagccaggcgcagataaacaaaaagcacaatgccccaagcgcgcaccagaacacggcgctcaacacccacgccatctcctgccagaacgtccggtgggtcacgaagaacagccgcatcgtcaccatgcagaccggcgccgccagtatcgcgccgagcaaaggacgcagcacccgccgtccgggagagagacagctcgccgccgcccctggcagcaaaaagaagagcaggcccagctccgggttgccgctggcgcgaaatgcccctttcatatgtaacaacaacgataagcacaccacaatgaacagaacgaagccacagataatgccggcccaactacgctcagatttcaccgtatcctcctgatgttgcctctaactcacgtccacgtcgcccagtcagataaagcatttcggcaatccatgccaataactccccttccagcctaaaaacgattgtcactagccgccgcatccaggaaggattaaactagcggtatatttttgctggttataacagggtgccagaataggttcgcgacaacgcgaacgcctgagcaaccttagaccaaataaccatttccttcaacaacttactagtaaatgagaagttggctttcgtgaatataaacgtcgcagatttgttaaacgggaattacatcctgttattattcgttgtacttgcattaggactatgcctgggaaaactgcgtctcggctcagtacaacttggtaattccattggcgttttagtcgtttctctattattaggccagcagcatttcgcgattaacaccgatgcccttaatctcggctttatgctgtttattttttgcgttggcgtagaagccgggcccaactttttttctatttttttccgcgacgggaaaaactacctgatgctggcgctggtgatggtcggcagcgcgatgctgatcgccatggtgctgggtaaagtgttcggctgggatatcgggctcaccgccggtatgctggcaggcgccatgacctccaccccggtgctggtgggcgcgggcgacaccctgcgccatttcggcctgcccagcgatcagctggcgcagtcgcttgaccatctgagcctcggctatgccctgacctatctggttggtctggtgagcctgatcgtcggcgcccgctatatgcccaagctgcagcatcaggatctgcagaccagcgcccagcaaatcgcccgcgagcgcggcctcgataccgattccaaacgtaaagtctacctgccggtgatccgcgcctaccgcgtcggcccggagctggtggcctgggcggatggcaaaaatctgcgcgaactgggtatttaccgccagaccggctgctatattgaacgcattcgtcgcaacggcattctggccaacccggacggcgacgcggtgctgcagatgggtgacgatattgcgctggtgggttacccggacgcccacgcccgcctcgacccgagcttccgcaacggtaaagaggtgttcgaccgcgatctgctcgacatgcgcatcgtcactgaagagattgtggtcaaaaaccacaacgccgtcggccgccgcctggcgcaactcaagcttaccgaccacggctgcttcttaaaccgggttattcgcagccagatcgagatgcctatcgacgataacgtcgtactgaacaaaggcgacgtgctgcaggtcagcggcgacgcccgccgcgtaaaaaccgtggccgaccgcatcggctttatctccattcacagccaggtgaccgatctgctggccttctgcgccttctttatcgttggcctgatgatcggcatgatcaccttccagttcagctccttcagcttcggcatcggcaacgccgccggcctgctgttcgccggcatcatgcttggcttcctgcgcgccaaccacccaaccttcggctatatcccgcagggggcgctgaacatggtgaaagagtttggtctgatggtgtttatggccggggtcggtctcagcgccggggccgggatcaataacgggctgggcgccgtcggcggccagatgctggcggcagggcttatcgtcagcctggtgccggtggtgatctgcttcctgttcggcgcctacgtgctgcgcatgaaccgggcgatgctgttcggcgccatgatgggggcccgcacctgcgccccggcgatggagatcatcagcgataccgcgcgcagcaatattccagcgctcggctacgcaggcacctacgccatcgccaacgtgctgcttacccttgccgggacgctcatcgtgatcatctggccagggctacaataattttttgagaaaaaagccgtcacaggcagaactttttctcagggcatcagtcataagtaatgccactgcttttctttgatgtccccattttgtggagcccatcaaccccgccacttcggttcaaggttgatgggttttttgttgcctgcgtttagccattccgggtgaaacgccgcttcagcgcccctcttcctgcgccctctcccccgccagctgcccgaccatcatgcggattgccgccttcgacagcggcgcgcggtcggtgacaaagtgcaaggtcatcccttcaataaaggcgtcgagaccgcgggcggtatcgggggcgaaccactgctccagcgtctgctggctgcgccgcatccagttctgcatcaccgccttcagcgccggctgactgctgcagaacgcgtacagctggtacatcagctccatattgcgcgccgtggtcacctgggcgctgaagatcagatccgcgatggcatcgcaggcttgttcccggttcgttaccccgacgaagccttgctgatactgcgccgacatctcggcggtaaacaggctgaacgcctcctcaattaacgcctcaatgccgctgaaatagtaggtcagcgatcccagcggcacattcgcgcaggtggcgattttacggtgcgtcaccgcatggatgccgtgcgccgcgatggtatccagcgtcgcctgcaggatgcgctcgcggcgctgcggatcgtttggtctacgggccatgattttcctcttccggtttatgtacaaatgtacacatacttgctactgttgtcttcactcttctcctttaaggcgtttacggatgacgacgcaatcctcgcgcagagcgctgcagcttcggctatgggcgctgtttatgttctttttcatccccggcttgttaatggcctcctgggccacccgcacgccggcgatccgcgatctgttggcgctatccaccgcagagatgggcgtggtgctgtttggtctgtcggtggggtcgatgagcggtattctctgctcggcgtggctggtgaagcgctttggtacccgcaaggtcatccgcaccaccatgtccttcgccgtgcttggcatgctggtgctcagcctggcgctatgggtcacttccgccccgctgttcgccttcggtctggctatcttcggcgccagctttggctctgcagaggtcgctattaacgtcgaaggcgcggccatcgagcgggagatgaataaaacggtgctgccgatgatgcatggcttctacagctttggcaccctgttcggcgccggggtgggcatggcagtgaccggattcggtctgccggccgccccgcacatcctggcggctgcgctggtggctatcctgcccatcgccattgctatccgcgccattcccgacggcaccggtaaaaatgccgccgaagtcgcccacggtgaggcgaaaggtctgccggtgtggcgcgacgcgcagctgctgctgatcggcgtcattgtcctggcgatggcctttgccgaaggctcggccaacgactggctgccgctgctgatggtggatggccacggctttagccccacctccggctccctgatttatgccggtttcaccctcggcatgacgctgggccgctttaccggcggctggtttatcgatcgctacagccgggtggcggtggtccgcggcagcgcagttatgggcgccctcggcataggcctgatcatcttcgtcgataacccctgggtggcgggcatctcggtgctgctgtggggcattggcgcctcgctcggcttcccgctgaccatctccgccgccagcgataccgggccggacgcgcccaagcgcgtcagcgtggtggcgatcaccggctatctcgctttcctcgtcgggccgccgctgctgggtttcctcggcgaacacttcggcctgcgcagcgccatgatggtggtgctgggtctggtgatggtggcggcgctggtcgcccgcgcggtggctaagccacaatctgaacccgttatggagaacagctaatgagcatcaaactgattgcggtggatatggacggcacctttttaagcgatgccaaaacttacaaccggccgcgcttcctcgcccagtaccagcgaatgcgcgaacagaatattcgcttcgtggtcgccagcggcaaccaatattatcagctgatctcctttttcccggagatcgcccatcagatcgccttcgtggcggaaaacggcggctgggtggtgagcggcaatgaagacgtcttcaactgccaactgccggttcaccacttcaacgccgtggtcgaccatctgcagacgttgccgaatatcgaaatcatcgcctgcgggaagcgcagcgcctacaccctcaatcgctacaacgacgcgctgaagacggtggcggcgaagtattatcaccgcctggaactggtggatgattttaaccatctcgatgacaccatcctcaaatttggtctcaacgtgccagacagcctgatcccggaaattcagccgaagctgcacgcggcgctgggggacatggtcaccgcggtggccaccggctacggcagcatcgacttaattatcccgggtgtgcacaaagccaacgggctgcgcattttgcagcagcgctggggcattgaggatcacgaggtggtggcgttcggcgacagcggcaacgatatcgaaatgctgcagcacgccgggtttggctttgccatggcaaacgcccgggaagacgtcaaagccgtcgcccgctatcaggcgccgcataacaacgaagaaggtgtcctgcagattattgataaggtgttggatcgcgaagcgccgttcgcctgataagacccggatgcgagcgcatccgggttgaaaacaactacccctgctgcgaattgccgacgcttttatctttcagaaagtaaatcatcagccccagccatagtaccccacccagcaggttaaacaggctgaacagcccgttgccgcccagctcgtaagcatgtttgctgagctcgatgccgacggtgaagatcagcatctgcagcattcccatcgccgccgagaccgtgcctttactcatctcgctggcgaacagggttaaacgcaccaggccggcgttcgcgaggccaatcccgaaggcgtagaagctcagaccggccgtcatccacagataagcgtgggaagagaccacggtcgccgccgcagagaggatcaggccaaacatgatcggccaaccgcccatgataatcagcgagcgcacggtccggcgcgcagtcaggcgcgccagcaccaggttgccggcaatcagcgccccgaaaatcggcacctgcagcatgccgtactcatagctggtggcctgttcgccgctgataataatcaccggcgactgggcaatccacgccagcagcggcaggctgacaaagccagtggccagcgcgccggcgacgaagcgcaggttcttcagcaccagccgatagtcgcggcccagctctttcaccgacagcttttcgcccagccgcgtcgcggtctccggcatcgcccgctgcaggccgaagaacgagatggccgccagcacggcgaacaggacaaacatcatctcccacggcaggatatgcacccaggcggcgcccaccagcggccccagcagcggggctatcagcgccacgttagccatcagggcggtgattttgatacacaccgcctcctcaaaggactcctgtatcgccgcatagcccaccgcgccaataaagcacaggctgatcccctgcaggaagcgcagcagggtaaactgctcaatggtctgcgccagcagcgtcgccaggcaggtgacgatgaaccatactacgccagtcaacatcaccggacggcggccaatacgatccgacagcggccccagcagccactgtaaaaacatgccgcctgccagataggcagtcattgaggtaggtacccattcgttgcccacctgaaattcctgcaccacggctaacatgccaggctgaatcatatcgttgccgatataagtggaaaattcgtacagcaccagacataacgggaacaacagcgcctgccttccgaggcggcggcctgaaagcgaataattttgcatgaaatctcttatctatcaaaaatcgcgcaaagtgtaatgaaactcccggcgcggagatagtgaattgtgggtgacaccgcacaatattacgagccgtgcgccatcgtcctgcctctcccctgttattcagcctgtgtatatattccgtttatgtttcagcaatgtgacaaacgatatactgacgtttttcaggctgttagccgtagactttatggtagtggatttcataacaacctgatctttaagacaatgccgcctttaactccgcaccgcttttatttagggtaggcggcttaattgctatcggaccaacgagcctggaagtctatgctggaaaaaattaactatgcgctgttcgccctgctcaacgcgacgcctgcctcgccgcagtgggccattgagatggcgatcttcatcgctaaagatctgattctgatcgtacctctgctggtggtgacattgtggctgtgggggcctgcccagcggcagatggtgtttaagctgatgctggcgctgacgatcagcctgaccgtgtcgtgggcgatcggccacctctatccgcacgatcggccgtttgtcgccggcgtaggctataacttcctgcaccacgcggcggacgactccttccccagcgaccatggcaccgtcagctttacctttgccctggccttcctgttctggcatcgcctgtggtccggcgccctgctgatggccattgccgccgccatcgcctggtcccgtgtctatctcggcgtgcactggccgctggatatggtcggcgggctgctggccgggatgtgcggctgccttggcgcggcgctgatctggcacacgttcggcccggcgctataccatcagctgcagcggctgtatcgtctctgcttctccttgccaatccgcaaaggctgggtgcgcggctaaacgccgccgtcgctgcggccaccgcgtgactaacccgcaagcgacaggtaaaatcccgctaacgccctgcccccgcagggcgattttagcgcagagggaatatggaaactcgccgtgacgaacgtatcagtcagctcattcaggcacttaaacgcagcgataagctgcatctgaaagaagccgcttccctgcttggggtgtcggaaatgaccattcgtcgcgacctcaatggccacagcggcccggttgtgctgctcggcggatacattgtgctggagccgcgcagcgccacccattatctgctcagcgatcaaaaaacccggctggtcgaggaaaaacgccgtgccgctcgccatgcggccgcgctgctggaggcccatcagatggccttcttcgactgcgggaccaccacgccgtggattattgacgccattgacgatgcccttcccttcaccggcgtctgctactccctgaacacctttctggccctgcaggaaaaaccccagtgccgcgcggtcctgtgcggtggggagtttcatgccagcaacgcgatttttatgccgctgagccttgaggataccctcagccatctgagccctgatatcgccttttactcggcggcggggatcgactgcgagcagggggcgacctgctataacctggaagagctgccggttaagcactgggcgatgcgtcacgcgcgctaccacgtgctggtggtcgaccacagcaagtttggcaaagtgcgtccggcgcgcatgggggcgttagcgaaatttgacgtgatcgccagcgatatctgcccggatgatgagctggtcgcgctggcgaaggcgcagcagatttccctactgtattgaagcgtcgctgcccgcgccccgcagggcgcgggcaggcatcaggagaaccagctgccgaaccagccgtgcagtttcatcagcacgaagtcgatcatccggctgaagaagccgccctcttttaccgactccatgacaatcagcggacgctgttcaatggttttatcatttagcttaaagtcgatagtcccgaccacctgtcccttctccagcggcgcggtaagctgcggctgatttaaggtatagctggctttcaggtttttcagctggcccttcggcaaagtgatagagcccgcctcgccagcccccagtttcgcttcattgctatcgccaaaccacacgcgctgggtaacgaaggtggcatctggtttaatcggcgtcacggtttcaaagaagcggaagccccaggtcagcagtttttctgactcgttaaagcgaatgcggtcggttttggtccccagcaccacggcgatcaaacgcatatcaccctgagtggccgaggagacgaggttatagccggccccggcggtggtcccggttttcacgccatcggcgttgaggttgctgctccacagcaggcggttgcggttcggctggcgaattttattgaaagtgaactctttctctttatgtaccgcatactcttccggtacgtcgtggatcatcgctttggtcagcagcgccatatcgcgggcggtgctgaactgccccggcgcgtcaaggccgtggacggtcataaaggtggtgttggtcagccccatttttttggcgtagccgttcatcaggctaacgaaagcgtcctggctgcccgctacgtagtcagcaatcgcaatgctggcgtcgttaccggactgaatgatgacccctttgttcagatcttctacggaaacctgcatgccaggcttgaggaacatcaccgatgatccgcgcagcgccgggttgccggtcgcccaggcatcgcgcccaacggtcaccatatcggtcagtttgatttttcccgcttttattgcctgccctaccacgtagctggtcatgatcttcgtcagactggccgggtcgagtttttcatcggcattgccttcgctgagcaccttcccgctggcatagtccatcaggatccaggcgcgagcgtcaattgaaggggcgtcggggagttgttccgcagcctgcaccgcaggtgcgacaagaaataacagcgcgcaacctgccgcgaggccgcgaagggaaaaagcgtcatgcatcataagagccacccaagtatcctttccaaacaaaatatgccgcgccactctgaccgcgccgcagcaaccggtgagtaaagcgtacaaatgaccttaaagaaacagcgagttggtaaagtttttaaagtttacgcaataacatgccgctgtgctttaatcagaacaatttttttgatcgtaatcgccttaatgttaactttattatggcaagaaaaaaatcgcctttcaaaaccaattagtcaccgaaatttcaatgacatagctcacttgccttcgggaaaaatgctactaaagagaggtcgcaagcgtgtctttcattgtggtttgcctggttatagattcacattatggcgggagcgtgtggggtaagcgaaagcctggccagtgatatccagtcgcctcgccccccttcacctgagaaccggggatggttgttactgctgatacccttcacaaaactcaaaatgtcggcccggttgcattccatgaggcccagttcaacttccgaactcacaataaccacatctgacttgctgctgtagaagtctcagacgcttaaatataaacctgaaggttctgtaggccctatttacgcctgaaatgcagttgagaactcccgggctatgcttgagacggtcattacgcccgtctcaggaaattagcaacaacgcccgcacttttctctccatcgggcctgcccgatcgccatgttcagcagggcttcgattgccatagcattccgccgatggaggcgcaatatccttgataaagcatatcaatcagctatcccccctatacgccaccattagggattgaggtcaggaagggagagcctcccgctaatgatatgaattattcgcccactggataagcaggcagacggctttcctgttttagtcggcatatcggtaaaagatagtttatcgggctattttccctttccgtattacacaagtaagaaaaatagcacatcgataaggatggattcctggtcattaaatacagtatagtttcccctgcaatctttatggaagcgggtagctcacccgcagttattccataaattaagattcgcatattgtgttgaaaatggcatatccctttatgcgtgtaattacaccccagcctgtcgctgggcttttttttttcaaggcgactctggatggtgataaattttacaaatacattcataacagcgcatccacagccgtggcctttacagaagtattgctctcaaaaccccgggccgctctgattctgttgcccgttattaatcacgccggtttgatgaaaaggttaacatctcttcccgggtaatctcctacccttctcgtccgatgccatatcgagctctacgactcgctcttccagactgcagttcgccagtgcttcttttatccctatttcgttttgcagggatgttttgatagcaccgcgatagtatgctggccatccttatcagtcattcattttaaccgcctttttcaaatccttccggggaaagtaaagtcctctaccaggctctgctcgtttaacgctatagattcaaatactgattattgcattatataccacttacccccgcagtgattacccaggtaagataaatagcacaaaagtaagggtggattcctggttatttaatacagtatatttcccatgtagtctgtatggaagttgatggttacctttggttaacccatacttcgagactcgaatattatcttgagaacagcatgcaaccctgagtaaatttactccccagtgccagtcactgggttttttttgctatttttcagaatatcttccagccagtcggcgcctctcatggtctattttttctgggtgggatgaaaaagatgtatatccgatcgataaaaacaacagttcatccctgtaaaaaaataattctttcactgactttctatttattaatattaacctgtgttcctcagatgattgcgatgcaataatcagcatcaaattataccctcaggcgacattgagattttaaccgagacggagagggagcgtttttatagatgcgtgcatgatttaaagatttaattatcaataagatacaccatgatcacgccctttccttcgtagcgtaacaccctatagatattactcctgtaaaatagtaaaaacactttccgggccctgtgacccaggagtgcccctggctgaagggagtaagcataaaaacctttaataacagccaaataaaaaagcttgccggatttttaactttatcccaacatgatcgccgatcgcgctgcaacggcagtgaaacaaactcaggagcgaaaatgattacactgtggggacgtaataactcgaccaacgtgaagaaagtacgctgggtgctggaggagctggatctgccttatcagcagatcctcgccgggctggagtttggtctcaatcatgacccggaatatctggcgatgaacccgaacgggctggtgccgttgttaaaggacgatgccaccggggtggtattgtgggaatcaaatacgattattcgctacctggcggcccagtatggcgttgaccgtctgtggctggccgcgccggcgcagcgcgcgcaaggggaaaagtggatggattggtccaacggcaccctctctcccgcccatcgcccggtattaatgggcctggtgagaacgccgccggagcagcgcgacccggcggccatcgccgcggggatcagcgcctgcgaagcgctgttcgccatgctggacgacgaactggccaaaacgccgtggctctccggcgagcagttcggccttggcgatattgccgtcgctcccttcgtctacaatctgttgtcgatcctcgacagctggcaaccgcggccccatctgcagcgctggtatcagcagattagccaacgtcctgcctggcgcgaagtagtgcagatcccggtgacctgaggctaagcctcgggactcaaccgcaatagctcgccgttagactcgtcggttaaaacgtacagatagccgtcgggtcccacgcgaacatcgcggatgcgttttccgcgcgcctccagtaatctcccctcctcgcggacctgattaccgtccaccgccaggacaatcagcgatgtctccttcagcgcgccgataaatagcttatgctgccactggggaaaggtcggcgccgaataaaaggccatcccgctcaccccgggagagaccggccagacatacaggggaggttcggtccccggaaccgttttgccttttgcttccggaatgggcaggccgctgtagttaataccgtgcgtcgccagcggccagccgtaatttttccccgcctgcggaatattaatttcatctccgccgcgcgggccatgctcgttcagccacagcgcctcgctccagggattcatcgccatgccctgcggattacggatgccgtaagcccagatctccggcctggcgtcagcccggccgacaaaagggttatccggcggtacacctccggtctccgtcaggcggaccactttcccctgcagcttgctgagatcctgggcggtggcgcgctgattattttcgcccagcccgataaacaaatatcctttgccgtcgaacaccagcctgccgccaaaatgattgccgacggagagcttcggctgctggcgaaagaccacggtaaagttcgtcagctgcgtggcatcctcgctcaaccgcccatagcccaccgcggtgcccgccttaccgctggcgtcgctttccgcatagctcagccacacccgccgcgactgggcgaaatccggggccagcgccacgtccagtaggccaccctggccgttggcccatacctgcggcacgccggctatcggcgccgacagacctttacccggctgccagcgcttgagctcgccgccgcgcagggtgatcagtatgccctgatcgtcaggcagaaaggccatgccccacggctgggccagccggttttgcaatacctccacccgcaccgcggcctggctcagggctggtagcgctaaggcgctcaatatcaacagcagtgggatcggacgcatggcattctcctttcgtcagctctgggctaaagggtagccagcggggaaatttgcgcggggatttttacataacctttaacaggggaagcgttcacttcccctgggtttcagccgatcaggcatgagtgattggcgccaatttattcaatttatgaatatttgaggtcaatcctgtcagacagcgttctagcttctctacgttaacagcgatgtatagcggacaatcatgatgcccgctcatcaggcatagtgcagcggcggcgaccgattcgccggccaggcgaaggacatccctctcctccggtgaaatggcattctgcaggcgcggcgcctgcgcacgcatttcacggcaaagctcaaacaagttatcacgcagatggtcattttcgctgactgacatgtagcctttggcctttcgcagttgcagataggcgtcaatatcgatattggcgttaataagcttctgcagaaggtggcggtatagtctgtcaacggtcatcacggttcctcctctgtcgtcctttaccctttccataatacggttattttttgtgcaaaatgatgcgccaggtcaataatccccagttctctaacatcatttacaatgtggcaactttaacgcattgtagggtgtataacaaaaaaaatgttatacgatcacaattaatttcaagatgaaattaataaacagaaaatggcaataagagacaaaattagtgcagcgatgatcacaatacctcatatgatctgttgcaccatcgtcaattcggatgtcataacaaataattaatgtaatacgtataacatgtcaggaaaacagcgaacgcggcccgcggatcgctgacattctctctgcccatttgcaaggaactgaaacatgacgtccggtaaaagaaactaccttctgttgagtcttttcgatttcctctacctgttcgcctggtcgtcgaccatggctttcttcgttatctggaccacccagcatcttggcatcagcgccacgaagaccgggctgctttactcggtcaacgcctttatcgccctgctgatgcagcctttcttcggctttatctctgacaagttcggcctgaaaaaacggcttatctggctgctggtcgccctgctcctgccggtgggccccttctttatctacgtttacgcgccgcttctggtgcacaacttttggtttggcgccttgctgggagggatctatctggggatcatctttaactccggctgcggagtaatcgactcttatatcgataagatttcccggcgctatcagttcgaatatggtcgtgtgcggatgtggggctcgttaggctgggcagcggcggcctggattgtgggtaagtatatcgacagcaatcctaatctggccttctggctcgccagcctcgccattgtcatcgccgccatctgctttatgctaaccaaaattgaattaaccgacgccgatgtggcgcgaagcgaatcgctgaaggtctctcatgcccttgagctggcgaagaatggtcagttctggatgctgctgctctttaccctgttcgtcacgcagatttacgacacctacgatcagcagtttgcccagtacttctcgctacagttcccgacgccggaggaaggcaaccgctggtacgggatcctcgcgtctattcaggtctgcggtgaaaccctgttcctctgcctgatgccatggtttgttaaccggaccggcgccaaatgggcgctgatcatcgccgggctgatcatgtcggtacgtattgtcggctcagccgtgcccctcggcccggtgtggattggtgcggtgaaaatgatgcatgctctggagaagccgttgattctggtatcggtctttaaattcatcgccgccaacttcgaccacaagctctcttcgacggtctatttgctggtgctgttcgtcgcctcgatcgccaccgccatttactctccgctggcaggctatctgtacgataccattggcttcgccaacacctatctgattctcggcagcgtcgccgggctctttaccctgatctctattttcacgctgcaggataagcgcgagccgaaaaaaaccggcgccacgccctccgcagccattaacccggcgcaataagtctctgcccggcagccacgccgggcttgagccgcctgcgcgcgcggcttgtcagaagcgtgtcccgcccctctgctccggggcgtgtgggatccgctctggcggtggggggcgtaaaagacaggtcgggggcgctttttcaccattaaccgcgacggagctatactctttttcgcaaagatctgtagaattcctgccctgaccattccaataattgaacactttttaagctatgagcaatgtcacgcatcagccgaaaatcggcttcgtctccctgggctgcccgaaaaacctcgtggactcagagcgtatcctgaccgaactgcgcaccgaaggttatgacgtcgtaccgacctacgacaacgccgatatggtgatcgttaacacctgcggctttattgatagcgctgtgcaggaatcgctggaagcgatcggcgaagcgttgaaagagaacggcaaggtaatcgtcaccggctgtctcggggcgaaagaggatcagatccgcgaagtgcatccgaaggtgctggagatcaccggtccgcacagctatgagcaggtgctggagcatgtccaccattatacgccgaagccgaagcacaacccgttcctgagcctggtgccggaacagggggttaagctgacgccgcgccactacgcctacttaaaaatttctgaaggctgcaaccatcgctgcaccttctgcatcatcccgtccatgcgtggcgatctggtgagccgtccgattggcgaagtgctggccgaagccaaacgcctcgctgacgccggcgtgaaagagctgctggtgatttcgcaggacacctctgcctacggcgtcgacgtcaagcaccgcaccggtttccacaacggtatgccggtgaagaccagcatggtcagtctgtgcgaagagctggcgaagctcggcatctgggtgcgcctgcactatgtctatccgtacccgcacgttgacgatgtgatcccgctgatggcggaaggcaagattctgccgtacctcgatattccgctgcagcacgccagcccgcgtattctgaagctgatgaagcgtcctggttctgcggaccgtcagctggcgcgcattaagcagtggcgtgaaatttgcccggatctgaccctgcgctccacttttattgtgggcttcccgggcgaaacggaagaagatttccagatgctgctcgacttcctgaaagaggcgcgtctcgaccgcgtcggctgcttcaagtacagcccggttgaaggcgctaccgccaacgagctggcggaccaggtgccggaagaggtgaaagaagagcgctggaaccgctttatgcagctgcagcagcagatctctgccgagcgtctgcaggaaaaagtggggcgcgaaatcctggtgctggtagatgaagttgatgaagaaggcgccattggccgcagcatggccgacgctccggaaatcgacggcgcggtgtacctgaacggcgaaacccgcgttaagccgggcgacgtggtgcgggtgaaagtcgagcacgccgacgaatacgacctctggggtacccgggtctagtccagcttcccggatagcggcttagcgcattccccagcctacggggtcctcccgtaggctccccccaggtccgcgcaagcgcagcgccgccgggtaatttatcagtcatcatgccttcatattgccgggtggcggctaacgccttacccggcctacagttcgtgcggcctgccgttaatttattcaccattgttgctgaaacagccggtgctggcggcctcaacatcgctgagacgttcccgaaaggccggggcagcccgcatggatgcgggctgagggccgtgttttgcagggacgctgcttcggcccgatccgaagcctgcagggataagtcgaaggcaccacgcagtggcgatgttgctggccggagcccgggggtacagggggcggcggcgactggccgccccctgtgcgctccctgcgccataagagacataacgcagacgattaaccgggagcgcaaactacgctgaagccacagataacataaaggactttccagcgatgcttcgcttcaccctggccctctcccgggaggagagggaaccgtccggcggtcgtttccgcctcacaccgctccctgcgccatgagagacctaacgcagaaaattaaccggaagcgcaatgtgcgctgaagccgcagataacataaaggactcccggcggagctttccctcaccctacccctttaacttcggatccagcgcatcgcgcaggccatctcccagcagattaaacgccagcacggtcacgaaaatcgccaccgccggaaagagcgccacgtgcggagacatcaccatatccgcccgcgcttcgttgagcatcgcgccccactccggggtgggcggctgcgcgccgaggccgagaaacgacagactggccgccgaaataatcgataccccaatgcgcatggtgaaataaaccacgatcgatgacaccgtccccggcagaatatggttgaacagaatggtggcatcgctggcgccgatgctgcgcgccgattcaataaaggtctgctgcttcagaaccagcgtattgccgcgcaccagacgagcaaacgccggaatcgagaagatcgccacggcgatgatcacgttggccatcccgctgcccatgacggcgaccaccgcgatcgccagcaggatccccggaaaggcgaacaacacgtcgcaaagtcgcataatgagccggtcccaccagccctcatagtagccagccagcagcccaagcaccgtgccgatggccgcgccaatcagcaccgccagtaccccggcggccagcgagatctgcgccccgaccagcacccggctgaaaatatcccgtcccagggagtcgactccgaaccagtgcaccagcgaaggcccctcgttcagacggtcgtagtcgaaataattttccgcatcatacggcgctatccatggggcaacgatggctaccgcaatcagcaacagcacgaaaataccagcgcccatcgccaccggctggcgacgaaagcgccgccagaactcatgccagggggtatggatctcgccgggtctgatgcccggcatggcgttcagcgccgcctgccttctccagttaagcaatcgcaccttacttatacctgatagccgggtttatggccgcgtacagcacatccaccactaaattgataagaataaactccagcgaaaagagcagcacttccgcctgaatcaccgggtaatcgcgcatctccaccgaatcgaccagcaagcgcccaagccccggccagttaaacaccttctccacaacgatcgacccgccgagcagaaagccgaactgcagccccatcatggtcaccaccgggatcatcgcattgcgcagaccatgcttgagcaccacccgcgtttcgctcacccccttcgcccgggcggtgcgcatatagtcttcatgcagcacatcgacgaatgacgcgcgggtaaagcgcgccatgaccgccgccaccgccgcgccaagggtcaacgacggcaaaatatagtgccgccagctgtcggcccccaccgtcggcagccagcccagctcaaccgaaaacacctgcatcagcagcataccaagggcaaaagccggaaacgaaataccgctcaccgccagcgccattcccagacggtcgggccagcgattgcgccacaccgcggccgcaatccccgccgccatcccgaacagtaccgcccagctcatgctggccagcgtcagccacagcgtgggcataaagcgactggctatctcactggcaacgggacgccgcgaggccatggaaatgccaaaatcgccgcgcagcacgttggtgatgtagtgccagaactggacatgcagcggctggtcaagccccagctgctggcgcaccatcgccaccacctgggcatcggcctcaggtccggcaatcagccgcgccgggtcaccgggcagcatatggacgaatagaaacaccagcaccgcgacgataagcagagtggggatcaggcccagcaggcgcttaatcacataattcagcatcgctccctcccattccgggagagaggacgcatgaagatgaacatgatcacggcgtcaggtccgcctgttcgaagctaaagccggtatccggctggatatagaaaccggtgaggttcttgctgtgggcggagaccagtttctcgaccaccagcggcacccacggcgactctttccagataatatcctgcgcctctttatagagtttggttttctgttgcggatcggtggttttcagcgcctcgctcagcgcgttatccacctgcgggttgctgtaaaacgcggtattaaacagcgtcggcggccagttttgcgaggcgaacagcggcgacagcgcccagtcggcttcaccggtggaggcggaccagccggtatagaacatccgtaccccgctctctttctgccctttaccttccacttccgccgcccgctgaccagcgtccatcgccgtcacctgcgccttaatccccacctgcgccagctgctgctgggtgaactgcagtactttctgcgcggtgctgtgattatgtgatgaccacagcgtggtgctgaaaccgttagggtagcccgcctctttcagcagctcgcgcgctttcgccggatcgtatggccaggcggtgtaggtctgggcataggcgatcgacggcggcaccactccggtcgccggggtggcgtatccggcgaacgctaccttcaccagcgcctgacggttaatcgcatagttgatggcttcccgtaccttcggattatcgaacggcttctgcgtcacgttcatgctgatgtagcgctgcatgatcgacgggctggccaccagctccagtttgctgtttttcgccagcagcggcgcctgttcgtaagggatcgggaaggcgaactgcgcctcgccggtctgcagcatcgccgcccgggtattgttatccaccaccggacgccaggtgatagaatccagctttggcagccccggctgccagtacccatcgaacttgctgaccttcacaaaatccgtctggttccaggtgtcgagcttatacggcccggtgcccaccgggtggaagccgatatccttaccatattttttcagcgccgccggcgaaatcatcgctgtcgccggatgggcgagaatgttaataaacgccgagaagggctgcttcagggtaattttgaccgtagtcggatcgaccgcctcggtactggcgatatttttatacaggttatagcgcttgagatggttatccgggttactcgcgcgatcgaggttagcctttaccgcctcggcgttaaagtcagtgccatcctggaatttcaccccgctgtgcagcttaatggtgtacaccaggccgtccggtgacacggtatagctctcagcaagaacgttttgcagcttcatctctttatcaaggccgaacaggccttgataaaaggacttcgccaccgcctgcgacagggtatcgttggcatcataggggtcgagggtcgtgaagttagacccgaccgccaccaccacatctttggcggcaaaggcgggagcgctcgccagggctgccgcgatactcagcgccagccaccatttgcgtgaaacaggttgtgtcatcgtgttctcctgaaaagatgcgttatgtgttgttatgttctgcccagcacatcggcggattcgcgggcgacgaagtggcccggcccgacctgctgcaacggcacgctggcgatctcctcgccccgcttataaatattgcccgggacgtcatcagacagcaggacccgctgcggacgacggtggcccgggtcggccaccggtacggcggccatgagcttacgggtataggggtgctgcgggttttcaaacaccgcgcggcgcgggcctatttcgacaatgcgaccgcgatacatcaccgccacgcggtggctgatgcgctccaccaccgccatatcatgggaaataaacagaaacgcgatgcccatctcgcgctgcaggtcgagcatcagattgataatctgcgcccgaatggagacatccagggccgacaccgactcgtcggctatcaccaccttcggattcagcgccagcgcgcgggcaatgcagatccgctgccgctggccgccggaaaaggcatggggatagcgccaggcatgctccggctgcaaccccacgcgcttcagcagccaggcgacccgctcaagcgctgcttccccacgcagcaggccatgcacccgcagcggctccataatcgaatcgccgaccgtctgacgcggatcaagcgaggcgtaaggatcctgaaaaataaactgaatattgcgccgcagagcctgcagcttgccgccggcgagggtatcgatccgctgaccgtcgaaggtaatggtgcctccctgggtctctaccagcctcagcagcgcccggccggtggtcgacttgccgcagccggactcgcccaccagcgacagggtctctcccggccagagatcaaaactgaccttctccaccgcatgcacttcgcgcgtcacgcgattgagcagcccgccgcgcaccggaaaacgggccaccaggtcacgcacctgcaggatcggctcgccggcgactaccgtatcgggcgtttcgctctccgccagcggctggcccggcagcggaaaacggcgcggcagatcctggccacgcatctcccccagccgcgggaccgccgccagcagcgactgcgtatacgggtgctgcggcgaacgaaagatctcctcaacgctgccggtctctaccgcctcaccgcgatacatcaccagcacccgatcggcgatatcggccacgacgcccatatcgtgggtgataaagatcacccccatcgccatctccttttgcagaacggcaatgagttgcagaatttgcgcctggatggtgacatccagcgccgtggttggctcatcggctatcaacaccgccggccgacaggagagcgccatggcgatcatcaccctctggcgcatgccgccggagagctggtgcggatagcgcgagagcatctcttccgcctggggaatacgcacctgatcgagcatctttttcgccgcgcgcagcgcctcttcgcgccccaacccctggtgcaggcgcagggattcggcaatctgctcgccgatggtaaaaaccggattcagcgaggtcatcggctcctgaaaaatcatggccagatccgcgccgcgcacccggcgcatctcagcgtccgtttgctcattgagcgcgatcacctgccggttacgccgccgcaaccacagcccctcgctgttcacctcgctgctggccgcgtctagcagacgcatcagcgccagcgcggtcaccgattttcccgaaccggactcacccactatcgccagcgtctcgccgcggcgcaggctgaaggaaagctgacgcacggcctgcacctccggcgcatcctgctggcggaacgccacgttcaggttgcgcaccaccagcacttcgcaggtatcggtttcgtgagtttgcgacactcgccctctcccttgttctattcgcgataaatgccaatggtcggcgtatcgccggcatagcaccaggcgcggtacatgccttcactgttaaacggtaaaacgacgttgccttcgcgatcgacggctatcagcccgccgctgccgccgagagccggcagtttctccatcaccacccgctcgcaggcggaatagagactgagctgcccatactccatcagggcggcgatatcgtaggccgccagggtgcgcataaagacttcgccggtgccggtacaggagaccgccacgctggcattattggcataacaccccgcgcccggcagcgggctgtcgccgacgcgtccgggcagtttgttggtcatgccgccggtggaggtcgccgccgccagattgccggccagatcgagcgccaccgcgccgacggtgcccattttctggcgttcgtcgaggggagcggcgtggtggtcgaggataatctccccgcccgctttcgcctcctgcagctgcagcagcctttcaggagtggaaaagagatcgttatccacgcgcgccatcccgtgggagatggcaaaattttccgccccctcgccgatcagtaatacgtgcggactcttctccagcaccagacgcgccgccagcaccggattacgcaaatgtttgaccccggctaccgcgcccgcctgcaggctgtagccgtccattacgcaggcgtccagctcgtgggtttgatcgcgggtaaataccgcgcccattccggcgttgaacaacggacactcctccagcagccgaacggcctcggtcacggcatccagcgcgctggcgcccgcggccaacattttctgcccgctttcgacgatagtcgacagcgccgccacatactctcgctcccgctccggcgtcatttgcgcgcgagaaatcgcccctgcgccgccgtgaattgctataaccgccttgcccatttcgccagtccttaacgatgaagtggatcgcccctgccctgtcgtaccgcggcgcggcgccggtcacgtcatgaataagggtattgatatcattatattgctgaatgtcttatacaatttttgaatatagaaagagcggcgggcgatgtaaagcctcgtacccaggtggcatacagcccgcgccgcttttctgccataataggcgttttcgctgttttgcccgcaggagtgacccatggattttaccgccggactgatgccgctcgacacagccctcgcccagatgctcgatcgtattacgccgctgaacgcgacggaaactgtaccgctgttgcaggccttctcgcgtgtgaccgcccatgacatcgtctccccgctggacgtgcccggctttgataacgcggcgatggatggctatgccgtccggctgaacgaccttcgcgacggcgccgcgctgccggtcgccggtaaggccttcgccggccagccgttcaacgacgcctggccgtcgggcacctgtatccgcatcatgaccggcgcgccggtgccggaaggctgcgatgcggtggtgatgcaggaagagaccgaacagaccgacgccggcgtgcgctttatcgcgccggtaaaagccgggcagcatattcgccgccgcggagaagatattgcccaaggcgcggtggtcttcccggcggggacacccctgacggtggccgagctgccggtgctggcctcgctgggcattgccgaggtcgaggtggtgcgcaaggtacgcgtcgcggtcttctcaaccggcgatgagctgcagctgccgggtcaaccgctcggcgacggccagatttacgataccaaccgcctggcagtgcacctgatgctgcagcagttgggctacgaggtcattaacctgggcattattcctgacgacccggcgaagctgcgcgacgcctttatcgccgccgaccagcaggccgatgtggtcattagctcaggcggcgtctcggtgggtgaagccgattacaccaaaactatcctcgaagagctgggggagatcggcttctggaagctggcgattaagccggggaaacccttcgccttcggcaagctcagcagcagctggttctgcggcctgccgggtaacccggtgtctgccaccgtcaccttctgtcagctggtgcaacccctgctggcgaaactctcgggcaagcacggcccgcttcaggcgccccgcctgcgggtccgcgccgccacgcgcctgaaaaagtcgcctggccgcctcgattttcagcgcggtattctgcagcgtaacccggacggcgaactggtggtgaacaccaccggccatcagggctcgcacattttcagctccttcagcctcggcaactgctttatcgtgctggagcgtgagcgcggccatgttgaagcaggcgaatgggtcgaggtcgaacccttcagtcatctgtttggggggctgtaatgaccgttgagctgagcgatgaagagatgctgcgctataaccggcagatcgtcttgcgcggttttgattttgacggccaggagcggttaaaagccgctcgcgtgctggtggtcggcctcggcgggctcggctgcgccgccgcgcagtatctggccgccgccggggtcgggcagctcaccctgctcgatttcgacactgtctcgctctccaacctgcagcgccagacgctgcacagcgacgccaccctcggccagccgaaggtggattccgcccgcgaggcgctggcgcgcattaacccgcacgtccgtctggtcccgctcaatgccttgctggatgagaccgcgctggcggcgcagattgccgatcacgatctggtgctcgactgcaccgacaacgtcgccattcgcaaccagcttaacgtcggctgctttcagcacaaaaccccactggtctccggagcggcgatccgtatggaggggcaaatcagcgtctttacctatcaggatggcgaaccctgctaccgctgcctgagccgtctgttcggcgaaaatgccctcacctgcgtcgaagccggggtaatggccccgctggtgggcaccatcggttcgctgcaggcgatggaggcgattaagctgctgagcggctacggcacccctgccagcggaaaaatcgtcatctacgatgccatgacctgccagtttcgcgaaatgaggctgatgcgtcacccgcagtgcgaggtatgcggctcgcactgaccctcacaccggcgacgagagtcgccggtggttttgtgaccgctctcgttattttctcctctctgacttatccccatcccgcttgttgatttacgtcaacataactttcattcgaaagtgtttttatattcatacgcaaacaagaggataagccatgatcttcaacatccagcgctattccacccatgacggcccagggatccgcaccgtcgtcttcctgaaaggctgctcgctgggctgccgctggtgccagaacccggagagccgcgcccgtagcgaagatctgctgtatgactcgcggctgtgcctggccggctgcgagctgtgccagcaggcggcgccggcggttatcacccgcaccctcgatggcctgatcattcaccggcaaaacgttaacgacagccatatcgccgcgctgcgcgactgctgccccaccaccgcgctcacggtgtgcggcgaggagaagagcgtcgaggagatcatggcgacggtgctgcgtgataaaccattctacgatcgcagcggcggcggcatcactctttccggcggcgaaccctttatgaacccaacgctggcgcaagcgctgttcgaagccagtcatcaggcaggcattcacaccgccgtggaaacctgcctgcacgtgccgtggaaatacattgaaccgtctttaccctttgtcgacctgtttctcgccgatctgaagcatgttgacgaggccgttttccagcagtggaccgacggcagcgcccgccgggtgctggataacctgcagcgactggcgcaggcggggaaaaaaatgattattcgcgtgccgctgatccagggattcaacgccagcgaagccgacattgccgcgatcaccgattttgccgccgatcgcctgcaggtcagcgagatccattacctgccgtaccacacgctgggaatgaacaaataccagttactcagtcagccctacaccgcaccggacaaaccgctggacgctcctgagctgctcgccttcgcgcaggattatgcgcaaagcaaggggctaacggcgatattacgaggataaccctatgactaccctgaagctcaacaccctcagcgcccgtatccaggcccataaaatggcgctggtgcatatcgtcaagccgccggtctgtaccgagcgcgcccgccactatacggagatgtatcagcggcatctcgataaaccgatcccggtgcgccgcgcgctggcgctggctcaccacctggcggagcgcaccatctggatcaagcacgatgagctgatcgtcggtaaccaggccagcgaagtgcgcgccgcgcctattttcccggaatacaccgtcagctggattgagaaagagatcgacgatctcgccgaccgccccggcgccggcttctcggtcagcgaggagaataaacgcgtattgcatgaagtgtgcccatggtggcgcggccagaccgtacaagaccgctgttacggtatgttcaccgatgagcaaaaggcgctgctcgccaccggcattattaaggcggaaggcaatatgacctccggggatgctcacctcgcggtcaactaccccctgctgctggagaaagggctcgacgggatgcgtgcgaaagtcgccgaacgccgctcgcgtatcaatttgacggtactggaagacctgcacggcgagcagttcctgaaagcgattgatatcgtgctggaagcggtcagcgatcacagcaaacgcttcgccgcgctggcgcgcgagatggcgacagcagaatcccgcgaatcacgccgccacgaactgctgacgattgccgaaaactgcgacgtcatcgcccatgagccgccgaaaaccttctggcaggcgctgcagctgtgctacttcattcagcttatcctgcagattgaatccaatggccattcggtatccttcggccgtatggaccagtacctctacccgtactaccgccgcgacgttgagttgcaacagtcgctggatcgcgaacaggccattgagctgctgcacagctgctggctgaagctgctggaggtcaataagatccgttccggctcacactccaaagcctctgccggcagcccgctataccagaacgtcaccatcggcggccagaatctggtggatggtaagccgcaggacgcggtcaacccgctgtcgtatgcgatcctggaatcctgcggtcgcctgcgttctacccagccgaacctcagcgtgcgctaccacgccgggatgagcaacgacttcctcgacgcctgcgtccaggtgatccgctgcggtttcggcatgccggcgtttaacaacgatgaaatcgtcatcccggaattcattaagctgggcattgagccgcaggacgcctacgattacgcggctatcggctgtatcgaaaccgcggtcggcggtaagtggggctaccgctgcaccggcatgagctttattaacttcgcgcgggtgatgctggcgacgctggaaggcggccgcgatgccaccagcggtcaggtgttcctgccgcaggagcacgccctgtcgaaaggcaacttcgctaacttcgatcaggtgctagccgactgggaccgccagattcgttactacacccgtaaatccatcgagattgagtacgtggtcgataccatgctggaagagaacgtccacgatattctctgctcggcgctggtcgatgactgcatcgaacgggcgaaaagcattaagcagggcggcgcgaagtatgactgggtttccggcctgcaggtgggtatcgccaacctcggcaacagcctcgcggcggtgaaaaaactggtcttcgatcagggcgccatcggccagcaggagctggcgaaggcgctggcggaagatttcgacggtctgacccacgagcagctgcgccagcggttgatcaacggcgcgccgaagtatggtaacgatgatgacagcgtcgaccaactgctggcgcgggcctaccagacctatatcgacgagctgaagcagtatcacaacccgcgctatggccgcggcccgattggcggcaattattacgctggcacctcctctatttccgctaacgtcccgttcggcgcgcagaccatggcaacgccggatggccgtaaagcgcataccccgctggcggagggggccagcccggcctccggtaccgaccatctggggccgacggcggttatcagttcggtgggcaagctgccgaccggggcgatcctcggcggcgtgctgcttaatcagaagctgaatccatcaacgctggagaacgagtccgataagcagaagctgatggtgctgctgcgcactttcttcgaggtgcacaaaggctggcatatccagtacaacatcgtgtcgcgcgacacgctgctggaagccaagaaacatcctgaccagtaccgcgatttagtggtccgcgtcgctggatactcggcgttcttcaccgccctgtcgccggatacccaggacgatatcatcgcccgtaccgaacatacgctgtaatccttcgtgcccgctggcgctatgcttagcgggccaaccctgttctgcaggccggaaaagacatgcccttccggcattttctgaatgcctgaactttcattcgaaataaatttgtgctcctcatcacattgtaattagaatgttactggtcgaagttaagccaggagcactctcttatgaccgttaaagttatcgtcaccgatatggacggaacttttctcaatgacgccaagcagtacgaccgcccgcgtttcctcgcccagtttgcgcagctcaggcagcaaggtattgaattcgttgtcgccagcggcaatcagtactatcagctgatctcatttttcccggaaattcgcgagcagatttcattcgtcgcagaaaacggcgctctggtttatgaacatggcaagcagctgttccacggcgaactgacccgccacgaatcacaagtggtgattggcgaattgctcaaagatccgcagctcaactttgtcgcctgcggcctgcagagcgcctacgtcagcgataaagctccggacgcctttgttgagctgatgtcgaagcactaccatcgcctacagcgggtgagcgactatcacgccatcgacgatacgctgtttaaattctctctcaacctgccggacagcgagatcccacagctgattgataaactgcacgtgtcgctcgacggcatcatgaagccggtcaccagcggctttggctttgtcgatttgattatccctggcctgcataaagccaacggcatcagccgtttgctcaagcgctgggatctttcgccgcagcaatgcgtcgccatcggcgacagcggcaatgacgccgaaatgctgaagctggtgaaatacgctttcgccatgggtaacgctgccgacagcatcaaggccatcgccggctacgctaccgacgataataaccatgacggcgcgctgaacgttatccaggccgtcctcgataacaccccgcccttcaacgcctgacccttcgccggggcatcgcgccccggttttccattttgtgcgccgcagcaagattttaaacttgcattaactccattttaacttaaattaacgtttgtaatatttcatactttcgaatgaaagatacagcgaggttattatggctgctctcccgacccacgaaatacttcccgccgatcacaaagcggcgattcgccagatgaaacaggccctgcgggcgcaaattggcgacgtccaggcggtgttcgataagctctcagcgcgcatcagcgagcggctgcaggagattgagacactgaaagccgcaggccaggaggtctggccaaccattccgttccgcgatatcgccgaaggaacagtgagcgatgagcagcgcgcggccattaagcgccggggctgcgcggtgattaaaggccacttcccacgcgaacaggcgctggcgtgggataccgcgatgctggaatatctggatcgcaaccatttcgacgatgtttacaaagggcctggcgacagcttcttcggttcgctggaggcttcgcgcccggagatctacccgatctactggtcgccctcgcaaatgcaggcgcggcagagcgatgaaatggcggcagtgcaatctttcctcaaccgcctgtggcgttttgaacagaatggcaaacgctggttcgatccggacgtcagcgtgatctatcccgaccgcatccgccgccgcccgccgggaaccacttcgaaggggctgggggcgcataccgattccggcgcgctggagcgctggctgcttcccgcctatcagcaggttttcgccaacgtttttaatggcaatatcgacgcctacgacccgtgggacgccgcgcaccgtaccgaagtggaagagtataccgtcgacaacaccaccaaatgctcggtgttccgcaccttccagggctggaccgcgctgtcggacatgatcccgggtcaggggctgctgcacgtggtgccgatcccggaggcgatggcttatgtgctactgcgccccctgctcgacgatgtgccggaagatgagctgtgcggcgtcgcgccgggcagagtgctgccgatctctgagcagtggcacccgctcttaattaaagcgttaagctcgattccagcgctgaatgccggggactccgtctggtggcactgcgacatcattcactcggtggcgccggtggaaaatcagcagggctggggaaatgtgatgtacattccggccgcgccgatgtgcgagaagaacctcgcctacgcgcagaaagtaaaaatcgccctggaaaaaggcgcctcgccgggggatttcccgcgcgaggattatgaagccagctggcaggggcgcttcaccctggaggatctgaatatccacggcaaacgggcgctgggtatgctggtctaatcgtcatacagccccttcggctcgacggcggtatggcctttgcccggccggatccgccgtaccgaatcgcgtaccaccagcgtgccatgcagcagtagcgagccgtgcggcgcctccgggcgcagcaggcgctgctgcaggagatgcaccgcctcgctgcccagctcatcccgcggcacatgcaccgcggtcagcggcacctcctgaatcgccgccagattaaatccgtcaatgctcatcaccgagacatcctgcggcacccgcaggccacgcttttgcaatgcgctgacggtgccggcggccataaaatcgccgcccaccaggaaggcggtgggcaacggcctgccctgtaagccgtcaagccaggcgcccacctgctcttccgtctctctggcgctaaagttggcgacgctgataagatcccggctggcggtaaagcgcagattacgcgcgcgccacgcctcctgaatcccccccagccgcagctccatggtatagcggcgcaggcacatcacgttcatcaccgcccgatgccccatatcaaacagatagcgggccgcgcactggccgatcagccgatgatcgggagcgatggacggcagccgcatcccttcatcccgacagttgatcaatacgcagggtttgcccagatccgccgccaggccatgaatatgcggatcgtcgatccccagcagtaccgcggcctgggtctcaggttcattcatgcgggcaagaaacaggttggcgtcgctgtcgttctcatccagcgcgcagtagcgcaggcgcacttcatgtgccgccagcgcgttattgatactctggatcacccggtagtagaagatatccgatcgctcatcgaatgcgcgctgcggggcaaacaccagcagatgattgagcagcagacgcccggcggccaacccctgcatgacacccagctcgcgggcgcagtccagcaccgcccggcgcgccttgtcgctggtattcgctttcccggccaggacgcgtgaaacggtgctgggcgatagcccggtgcgggcggcaatttcggcgacgcgcagctttttatccattttgtgatccagctccgattgaaaaatgaaagaattttcataatcgccaaagcacacgttacaagcaaattccgctgtcaaatatgcgatctcgctcatttcatgaaaaaacttgcataaatagcgctttgccagacgatttttctgccctagcctgaattggtccaacatctcccatactagttataccaatgatgttgagattaaaaatagactattcaaatagttaataaatctacgtgaccactcagggagtgagaccgtcactttccccctacaaacgtcttgtggagtgtgctatgagtcaaggcctcaacaatgatatcgccgtcagcaaaacgcgccgggtagtgaaaaacctgcgctggtgggtgctggtcctgtttttacttggcgttaccgtcaactacatcacacgcaactcgctgggaattatcgcgccggaactgaaagcgaccctcggcattactaccgaacaatactcgtggatcgtcggcgcgtttcagctggcttacacgattttccagccgctgtgcggctggcttatcgacgtcatcggcctgaagcttggctttatgatctgcgccaccctgtgggcgctggcctgtatcgcccacgccggggccggtagctggctgcacctggctatgttgcgcttctttatgggtggggccgaggcggccgctactccggccaacgccaaaaccatcggcgaatggtttccgaaatctgaacgcccgattgccgccggctgggctggcgttgggttctccatcggcgcgatgctggccccgccgatcatctacttcgcccacgcctccttcggctggcaaggggcgtttatgtttaccggcgcgctggcgctactgtgggtagtactatggtgggccttctatcagaccccggaaaagcaccccaatctcagcaaaagcgagctggagtacatcaaacaggataacgaagccccgccggtaaaacagcccttctttaccgcgctcaaaaccgtctcgaaaaataaacgtttctacgggatcgccattcccgcctttatggccgagcccgcctgggcggtgctgagtttctgggtgccgctgtacctggcgaaagagcacggcatggatttgaagcagatcgccatgttcgcctggctgccgtttctcgccgccgatctcggcagcgtggtcagcggctacctcacccgcctgtatgttcgctggttcggctgtacgcgagtgaactcggtgatcgccagctcggtaaccggcgcgttcctgatgctctccctggccctcgtcgccatcacccgcgatccctatatcaccatcatcctgatctccattggcggcttcggccatcagatcatctcctgcatgctcagcgcgctggtggtggagtctttcgacaagggacaaatggcgacggtcaacggtatgcgcggctccgcagcgtggatcgccagcttcttgttctcgttattaatcggggtgaccgccgacaaaatcggcttcaacccgctattcatcgccatgggtttctttgacctgattggcgccgttttcctggtggcatttattgctgaacgtcgcgccaagcgcgcctgagagtggatgtaagatatgaagacgctgaaacactggagtttgcatcaacagctgaagcatcacgttgaactgacggtcgatggccagcacaccctgtgcctgtatgtactggaagagaatttgttccgcgtcctgctaaaacgccagggccagctggcgctggatcgcacctggagcatcgctccgcagcaggatgtgccgtgggaaggccgcgcccgggatgacctcagcggttttagtctcccggcctggcagctgacccgggagggcgatacgctgactatcgccacccgccagctgcgcgtcatcgttcaccagccgctgtggctggagtggagctatcgcgacgaggccggcgaatggcagccgcttgctaatgaccgtccgaccagcgcctatctggcgaatgcccacggcgacggcgtcgcccattatctgagccgccgcaaagacgagcgtttttacggcctgggcgaaaaggccggcgacctgcagcgcaccggtaaacgctatgagatgcgtaacctcgatgccatgggctacaacgccgtcagcactgacccgctgtataaacatattccgttcaccatcacccagcgcagcgatatcagctacggcctgttctatgacaacctgagcagctgctggctggatctggggaacgagatcgacaactaccacaccgcctatcgccgctggcaggcggaagccggcgacatcgattattacctgtttaccggtaagcaggtgctggatgtgaccaaagccttcgttcgcctgaccggtaaaacgctgtttggacccaaatggagcctcggctacagcggctccaccatgcactataccgacgcgccggatgcgcaaaatcagctgatgaactttatccgcctgtgcgagcagcacgcgatcccctgcgattcgttccagctctcttccggctatacctcaatcaacggcaagcgctacgtctttaactggaactacgacaaggtgccgcagcccaaagtgatgagccagtcgtttcacgatgccgggctgaagctggccgccaatatcaaaccgtgcctgctgcaggatcacccgcgctacggcgaggtggcggagcgtggtctcttcattcgcgattcgcaaactgacgctccggagcgttccagcttctgggatgatgaagggtcgcatctcgatttcaccaatccgcaaaccttggcctggtggcaggaaggcgtgaccacccagctactggagatgggcatcgattcgacctggaacgataataacgaatacgaagtatgggacggcgaagcccgctgctacggctttggccgtgaaatcgccatcaaacatattcgcccggtgatgccgctgttgatgatgcgcgcctcgctggaagcccagcagcgctttgcgccgcaaaagcgcccatatctgatctcccgctccggctgcgccgggatgcagcgctacgtccagacctggagcggcgacaaccgaaccaactgggatacgctgcgctataacatccgcatgggcctggggatgagcctttccgggctgtttaacgtcggccacgacgtcggcggtttctccggcgataaacccgagccggaactgtttgtgcgctgggtacaaaatggcgtcatgcatccgcgctttactattcactcgtggaatgacgaccagacggtaaacgaagcatggatgtatccggccatcactccggcgatccgctcagccattgagctgcgctaccgcctgctgccctatctgtacactctgctatggcaggcgcatgctgatgatgagccgatgctccgcccgaccttcctcgatcaccagcacgatgcgcagaccttcgccgaatgcgatgacttcctgctgggccgcgacctgctggtggccagcgtggtcgagccgggcgcccgccagcgtgaagtatggctgcccgataatcaggccggttggtacgatttctacagccatcagtggttcgccggcggccagtgggtgacgctggacgcgccgctggaaaaactgccgctgttggtccgcgccggcgctggtctgccgcttagtgaacgtatcagccatgtcgatgcgcaaaaagacgatcgtcgcgaactgcagctgttcccgctgaaaggtaccggctcaacccgcggtatgctgtttgaagacgacggcgaaagctggggctataaacagggggatgcgctatggctggagtgggaaatgacctgcagcgccagcagcataaacctggatatcaacgcccgcggcaactatcgcccggcgtggaaagcgctgaagctgtcattaccggtaggagaaaagcgtaagctgctggtgaatggcgttgaaggaacggagtggaggttctgaccataggccggcagtttcagccagcgcggtgaagacattaaaggcaggtcgcaagaaccgtaggtcgggtaaggcgttagccgccaccagacaaaaaaacggcaccgcgtgtcgcccgggtaaggcgtagccgctacccgggtaacggacagggattactcgatacctttgctgcgcaggtagtcttcgtagttgccgctgaagtcgatcacgcggtccggagtgatctccaggacgcgggtcgccagcgagctgacaaactcacggtcgtgggagacaaagatcagggtgccctgatacatctccagcgccatgttcagcgattcaatcgactccatatccaggtggttggtcggttcgtccatcaccaggatgtttggcttctgcatcatcagcttaccgaacagcatgcgccctttctcgccaccggaaagcaccttcgccggctttttgatatcgtcctggctaaacagcagacggccgaggatgctgcgtactgcctgctcgtcgtcgccttcctgcttccactggctcatccattcgaagaccgtcaggtcgttttcgaactcgtactcatggtcctgcgcgtagtagccgatttgcgcgttttcagaccatttcacgctgccgttgtccggctgcagttcgcctaccagggttttcagcatggtggatttacccacgccgttggcgcccagaatggcgatcttttcgcccacttccagcagcaggttgacgtttttgaacagcggaccttcatcaaagcctttggtaagggcttccacttccagcgcgttacggaacagtttcttatcctgctcgaagcggataaatgggttctgacggctggaggctttaacctcttccagcttgattttgtcaatctggcgcgcgcgcgaggtggcctgacgcgatttagaggcgttggcgctgaagcggctaacgaaggactgcaggtccgcaatctgcgcttttttcttggcgttgtccgccagcagacgctcacgcgcctgggtggccgcggtcatgtattcgtcgtagttgcccggatacacgcgcagctcgccgtagtcgagatccgccatgtgggtgcagaccatgttcaggaagtgacggtcgtgcgaaatgataatcatggtgctgtcgcgatcgttcagcgtctgctccagccagcgaatggtgtcgatgtccaggttgttggtcggttcatcgagcagcaggatatccggattggaaaacagcgcctgcgccagcaggacgcgcagcttccagcccggcgcgacttcgctcatcgggccataatgctgttcaaccggaatgccgacgccgagcagcagttcgccggcgcgcgcttccgccgagtagccgtccatttcgccatatttgacttccaggtcggccactttgtagccatcttcttcgctcatctcagcgagggcgtagatgcgatcgcgctcctgcttcacttcccacagctcgccgtggcccatgatgaccgtatccagcacggtgaacgcttcaaaggcgaactgatcctgacgcagcttaccgatgcgctcgttcgggtcgagagaaacgttgcccagcgtcggttcgagatcgccgccgaggatcttcataaaggtcgatttaccgctgccgttggcgccgatcagaccataacggttgccgccgccaaatttaacggagatattttcgaacagcggcttactgccaaactgcatggtaacgttgctggatactagcacggggatatcctgaaaaaagagtatgaggggtgtgatacagcagacattatgccagcaaatgacacacttttcacggcctgcggtaaattccaccgcggcgcttgtgctaaggtctttgtcagatgagccggaaacccgcgctcaaacggttattctgtacgtatttataaggagtcccatgaccagcagcctatcgcgacacccggcttttttatccctgcagggcggcatcaattttcgcgacctgggcggccagcttgccgccgatggacgccgcgtccgcagcggcaagctattgcgatccggcgcgctaaaccggttaacggcggaggatctcaaccacctcgatactttgccgctcagccgggtgctcgactatcgcgaccccggagaggtagctcgtactccggacaagcttagcccgcttacccattatcttaacgcgccggccaatccgccggtgagcgaggttaatgcgaaggtcaccgagctgaatgccgccacccttaacgcgctgaacggcgagcagtttatgctgcaactctaccgccagctgccgtttaacaacccggcctatcgccagctcgccgcgtggctgaccacgccttttgaaggcgctttactgcaacactgcgcggtcggcaaagatcgtaccggcgtcggctgcgcgttaacgctgttcgccgtcggctgcgatagcgaaacggtgatggaggagtatctccttacccacggcatgctgacgcaggtggaggcctggatgttggagctgctcggcaacgacctcactgcccaggggcgccaaagcctggcggatattctgacggtaaaagagtcctatctcgccgccgcgctgtcggctattcaccagcgctatggcaccgtcgacgcctggctggcggcagagtaccagcttaccgcgccggttcgcgccgcgctgcaggcccggctgctggaagagtaaccacccgttacccgcgcggcgagcgatgcttcggccgcctgccggaccgcggcagccgaggcaacagggaaaaaaatgtgatttcgtacacatctgatttacctgttcagcggaatgcacatataatgcgctcccatctactgtctcaatcattaacaaaggcctgtgtggcgttgatttcgcacacgacattaaagactatgaaattatctacactcttagcggcagccttcgccatcgtaggcttttgcaatacagcgtctgctgtcacctatcctttgccaaccgatggcagccgtttggttggtcagaatcaggtcattaccattccggatgataacaaacagccgctggaatacttcgcggcgaaatatcagatggggctttccaacatgctggaagccaacccgggggtggatacttacctgccgaagggcggtagcgtcctgaacatccctcagcagctgattctgccggataccgtgcatgaagggatcattatcaacagcgcggaaatgcgtctgtactactacccgaaaggcaccaataccgtgatcgttctgccgatcggcatcggccagttaggtaaagatacgccgatcaactggaccaccaaagtcgaacgcaagaaggccggcccgacctggacaccgaccgccaaaatgcatgctgaatacgccgccgccggcaacccgctgccagccgtcgtaccggccggtccggataacccgatggggctgtacgcgctgtatatcggccgtctgtacgccatccacggcaccaacgctaacttcggtatcggcctgcgcgtgagccacggctgcgtgcgtctgcgtaacgatgacatcaaattcctgtttgagaacgtgccggtcggcacccgcgtacagtttatcgatgagccggtaaaagcgaccaccgagccggacggcagccgttacatcgaggtgcacaacccgctgtcgaccaccgaagcgcagttccagggcggcgagatcgtgccgatcaccctgactcagccggtacaggcagttaccagccagtctgatgtcgatcagaacgtggttgagcaggctatccagaaccgctccggtatgccggtgcgtctgaactaagttgtgctgacaagaaaaacggcgggcctgatgcccgccgtttttttatcggcattttccctcgaggcggctaacgctcgcccgggctaccaaaccctaccacgccgtaaccccgctatgcgcagccgccagcaggagccccggcctagccgttattcaccagaataatcccgccgtgatcgtagcgataatggcagtgggcgtactccagcggcgtgccatcctccagatagataacctgctccacctccagcaccggatcggtcggttcgcagtgaagatgctgtttatccagttccccgggcttcatcgcccgcaccacgcggtaagatcccatcagcttcagccccagcgtctcctgcacatagcgaaacacggaaccttccagatggcttttggttaaccccggcaccagccccaccggcatgaccgtcagatccagcgataccggctcgccgttgagcagccgcaggcgaacaaagtcatacaccggggcatcggcgtcgataagcagcgaactttgctccttatcgctgggaaagcgcaccgcaaagcgcaccacttcgctttgcacctcgccaagatgctcccaggttttggtggcgccgaaatagtcgctgccgggcagctcccactgcgacagctgaaggaaatttttccgcacaaaggtgccctgccctttacgggtatagatcagcccttcgacgattaactggcgcatcgcctgctggatggtcatccggctggtgctgaactccgccgccagcgcaaactggtcgggtagcggcgcgctggcaggatactgctggctgatgatgcgtttttttatttcccgcgcgatttgcagatacttcgccgtcatttcccggtccttatccattcagtgagtggctggcgggctggatacaccatctgaccgccagggcagcgttacatcgcttcgccgttgctgcggaacacctgcttcagccatgcatagctcttcttcggcacccgccgcaggtccttgaggtcatggttttcgcgattgacgtacaccacgccgtagcgcttacgcatatcgccctgtgagctcaggatatcgattaatccccagccgagatagccgatcacctgcgccccatcctcaaagatggccgctttcatggcgttgatatggtcgcgatggtaagcgatgcggtaatcgtcggcaatgggatgttcgccgtcccaggactcaatcaccccgatgccgttttcaatcgggaacaccggcaggcgccagtcgttatagtaacgagtgatgatcgtccggaagcccagcggatcaatctgccagttccattccgtcgctttcaggaacgggttatcctggttgccaaacagcatatagttgttgaccgccgttcccggcgggatcgcgtcgctgttcaatgtgcggctggcgtaatagctgaacgccagataatcgaccttcaccgtcgccatcagggcgagatcctccggacgatagatatcatcgaacccttccgcggcgacaaaatgcatcacctccgggctataaccctcacccgcgtaggcgcgcagcaggttctggtttaagaactcatccagctgctgggcgcagaggatatcgcgtggtttgcaggtagccggatagaccagagcgtgagccagcattccgcccatctgacactgcggcttcgtctggtgcagatagtaagtcagatggacgtgcgccatcatgacatgatgctggatcagatacagttcgcgcagggtcttctctccctgcagatagccggaaatcagaaacgcttccggcgaatggtacagattctgctcattaaaggtgagccagtatttcaccttgtcgccatagcaggcgatcatcttctggccgtagcggataaaagcgtccatcacccggcggtcggtaaaaccgttgtagcgctccgccagcgacagcggcatatcgaagtggtacaggcagatcatcggctcaatgccgcgggcgatcagttcatctataaattgatggtagaaggcaatcccctgttcattgaattcgccatctccgtcagggcacacccggctccaggcgatctgaaaacggtagcagttcatgcccagatcctgcatcaaatcgaaatcttcccgataacgatgataagagtcggtcgccaccttccagtcggaggcgaactccgccggttgacggatatcatacaccgacatccccttgccaccctcgttccacgccccctccgtctgcatgctggagacggaatttccccataaaaaatctgccggtagtctgttcttcatgctgcgcctcggtatatgactagtcatttaaacgtaatgactagtcatataccggaaagtgaaaaggtaagcaaaggccgggatcggtttctgtgagccggacaaaaaaagatcgccccgaaaggcgatcctggcgatcgaagtgaatgatggcgcgattctgttgagatcaggcgctgagtttgaagagccagtagccgctgagtgccgcccatagcagcattggaatggagtagagatggaagcgccaccagatgcgccgatcgctggccatacgcagggcgataatattggccagcgagcccggcagcaggccaaagccgcccacgttaaccgcccaggcgagcagtattgacggcgggacatagttgagcaacagaatagtcgagggcacattactgatcacctgcgacaggccaatagcggtcagccacagaccaccgccggagagggtccccaccccgctcagcacctggtgcagcgccggaagctgggtcagcagatggacgtcaataaacatcaccataaacaccagcaacagcgaccagtcgacatggacgatcaccgcccgggccagcaccaggaagcccagcagcaccagcgccagcccccacagggcctgattcatctccagcgccgtcagaaacaccacatacagtcccagacagctccagacgagcttgggttgccatgacggcgccctgtcgctgctctggtaactgagccgcttcgccggaaaacagaaccagcacagcgccagcagggtcagcatcatcgccgctgccagaggcagcatctgaccgataaacccgaagaaagagaggccggatcgtccccatagcaaaatattctgcgggttgccgatcggcgtcagcagcgagccggcgttcaccgccaacgcttcgaaaataatcagccggttcaccgggatggcgcaccatttttttagcgtcagcgtcaacggcaccacaataaacagcgcaacgtcgttggtaagaaaggtagacagcagcgccgccgccagcaccataaagatggccagctggcgctcagtcacaaagcggcgggccatttttcggcccagcacgtcaaaatagccgctcagttcgatccccttagtcaacaacatcaggccgctaagcgtgacgatggtatgccagtcaatggccgccggccagcttgccgggacaaacggcacgatggcgctgagcacgcaggcgataatcagcagcaaatggagaaaacgatcgcgcagcagcgactggacgaagggaagagtcatgcttcctgagatccctgtgtttgggtaaatttcaggaacatcgccagcgtctcttcgctcacgtgatgctccatcccttccgcatcacgtcgggcaatctccgggctgacgccgatcgccagcaggaagttctccacgatttgatggcgctcgcggctctcctgggctagcttctcaccttccggggttaagaagatcccgcgccaggggatctgttcaataagaccgacgctggccaggcgtttgagcattttagcgaccgtcggttgcgaaacgccaagacgcgcggccatatccacctggcgcgcctcgcccacttcgttgatcagatcggagatcagctccacatagtcatcgatcagctcgcggcgatgcgcttcccgcacctggcgaaacccttccacgtgctcttcaacattcactaactgcgtcactttttttgttattgacttacctgcgcgacggttcattgtgcttcctcattcgtgtgacgcgtcaagcatcgtataaaaagatccacattgtaatggattgcgccaagagcacaaaaaattaacgttttagccatagctataaaatatagcctgtgctatatctgtatataatgcaaacatccatcagggaatgacggagcgaactggcaggaggagagcagatgaatgaattcaagaggtgcataaacgtgtttagccattccccctttaaagtacgattgatgctgatcggtatgctgtgcgagatgatcaacggtaaaccgcagcagggcaaacccaattcctaaggcggcgtcgcggtacgccgcttcatttttctgtcattttctgccggtaaaatgaccggttccccccgtttccctgaccttttttcaagttttgtaagcgccctcgcaaaacaatctgttatgtctggttgaccttaccatttacaagccctatctttgcacagccctgccacattcgcggctcgcagagaccctcttcacgcactgtccagcaggttttaccccttgacgccaggggatgcgcatggcctctttttgattgtttactatgaatgtcaccaccctgaaagatacgctggtcgcccgccgactggcactgaacccatggacgggattctactttttacagtcgctgttaattaacctggcgctgggctatgaatttagcctgctttataccgtggcatttacctgcgtgttacatctgctgtggcgcgcctttccgcgcgtccagaaagcggtggtcggcgcctattccctgctggcggctctgtactatccctttggccaggcctacggtgcccccaacttcaacactctgctggcgctgcacgccaccaacgtggaagagtctacggaaatcctgaccatcttcccgtggtacaactatctgctggcggtcttcatcttcgctctcggggtcattgcggttcgtcgtaggatcgttgagccatcacgctggggaaaaatggatacgctgggcctgttgttcagcatcgggatcttctttctccagccggtgcaaaaccttgcctggggcggtgtattcaaggtgattgacaccggttatccggcctttcgttttgtcaaagacgtggtggtgaataacaacgaggtgctggacgaacaggcgcggatggcgcagctggctggcatgaaagacagctggcacgtgctggcggtaaagccaaaataccatctctatgtggtggtgatcggtgaaagcgcgcgccgcgatgccctcggcgctttcggtggccattgggacaacacgccgtttgccagctcggtaaacggttatctgtttaacaattacatcgccgccagcggctcaacgcagaaatcgctcggcctgacgcttaaccgggtggtcgatggcaaaccacagtatcaggataactttgtcaccctcgccaaccgcgccggtttccagacctggtggttctccaaccaggggcaaattggcgagtacgacaccgctatcgccagcatcgccaaacgggcggatgaagtacagttcctgaaaaacggcgatttcgaagccaataaaaacacccaggacgagcagttgctgaagctgaccgagcaggtgctctcaacccagcgtacccagccgcagctgattgtcctgcacctgatgggctctcatccacaggcctgcgatcggaccaagggcaaatacacggttttcgttcagtcgaaagagacctcatgctacctctacagcatgacgcagaccgattcgctgctggctaagctttatcatcagttgcaaaattccggtgacactttttccctgacctatttttccgatcatggtctggcgttcaaggagcggggcaaagaggtgcagtatctggcgcatgacgataagttccagcagaacttccaggtgccgtttatggtgctatccagcgatgacaaagcgcataaagtgattaaggcgcagcgttcggcgaatgatttcctcagtttcttctcccagtggaccgggatccaggcggcggaaatcaccccacgctatcggtttatctctgagcaaaaggccggtccggtgtacatcaccaacttccagctgcagaaggtggactacgctcacctcggtaccgatgagttcacagtcaattaatcgcgccggcccggccagtcgcccgggccggccgtcagcaggcaaaaaaaatccgccccgagaggcggatttttcatatcaccggagtgattagaagcggtaacccacgccagcaatccaggtgccgacgtcaacgttacgaatacgagactgctcgtaggagaagtccagagcaacgttttcgatcgggttgaactgcagaccagcaccgtaagagaaaccgtagtcgctcatatcggatttatgagggtagttgttgttctggaatttaccgtaaccaacacccactacgccgtagatgcttgcccagtcgttcagacggtaagccggaccagcggtgatgccgtagtactgacctttgttgtaagtaccgttgctgttgttatccttctcggtgtaggtgaaggaaccgataacgcccagcgggttgttatcttgctcgtaacggtatttcaggttgaaaccgccagctttgttcgctttaccctgcatgtcgctctgcgcgtaaccgccggttacggtagaagttgcagcaaatgcagtggtacctacggatgcagccagaacaacggccagtgctgaaagacgtgcaattttattcataaccacctcaaatgtgtttctaataagtcctaagccttaaatatatcaaaaacttttgggaaactctttggagtttacattgtctaacatactttttcatgtaaccaaaagtttccatatttctgtaacaatatggaaaacaacaatttttggcgttaacttacatcttaacgctcattaagaaattcgcaagcatccagattaatcctaaccgcctggtgaatttctcagcagttttcgccattgtactgtttttgcccctgtttttttcaacattagctcaaccgccggcaggtaattccagtacactggaacttttaccccttttgacaaaacctgacaggagaaaggatgcccggtccatccagaaaagcggcggcatggttgccgatactggtgattttagtcgccatgacctcgattcaaagcggcgcatcgcttgctaaatcgctgttcccggtggtcggcgccccgggcgtcaccgccctgcgtctggcgctgggaacgctgattctggtggtggtgttcaagccatggcggctacgtttctccccagcgcagcgcgtgccgctgctactgtacggcctggcgctcggggcgatgaactatctcttttatttatccctgcagcgcattccgctcggcgtggcggtggccctggagtttaccggcccgctggcggtggcgctgtttggttcgcgccgcccgctggattttgtctgggtggcgctggcgatcctcggactatggtatcttctgccgctggggcagaacgtggcgcaggtcgatttaaccggcgcgctgttcgccctcggcgccggggcgtgctgggcggtatatattctgaccggacagcgtgccggtgaagagcatggtccagccacggtagcgatggggtcgctcatcgcctcgctggtgtttgtgccgttaggcatggcgcaggccaccgatacgctgtggcagtggtcgctgctgccgctgggtttggggatcgcgattctctctaccgcgctgccctactccctcgagatgatggccctgacgcgcttgccgacgcgcaccttcggcacgctgatgagccttgagccagcgttagctgccctctccggtatgatcttcctcggtgaaacgctgaagctctcccagactctggcgctcggcgcgatcattatcgcctcgatgggcgccacgctgactatgcaacggcagagtaaagtcgagcaggtcgatatcaattaacattctgttacggcgccggcccgagagaaatccgggctgttcaaccaaatataaatacctgatatttaaatacttttaaaataaccacccactttgcgctatcggagtgatatagcctgccgatgcctcactcttgaaaacccttgctatacttatttccgaagtcatttgggacaacgctccacatcattcagatctgaagtgtgatgagcatcaatatcaagaggatatgaaacgatgagtaccgcaaaactggttaaatcaaaagcgtctaatctggtctatacccgcaacgatgtcgctgacagcgaaaagaaagcgaccattgagctgttgaatcgccaggtgatccagttcattgacctgtcacttatcaccaagcaggcacactggaatatgcgcggtgcgaactttatcgccgtgcacgaaatgctggatggcttccgtaccgcgctgaccgaacatctggacaccatggccgagcgcgcggtgcagctgggcggcgtcgccctgggtaccactcaggtcattaacagcaaaaccccgctgcagagctacccgctggacatccatcacgttcaggatcacctgaaagccctggctgaccgctacgcggtagtggcgaacgatgtgcgtaaggcgatcgacgaagcaaaagacgaagacactgcagatatcttcaccgcggcttcccgcgatctggataaattcctgtggttcattgaagccaacatcgagtaaggctttgccgccggcccagcgcggtcggcggcgcctcagcgtttctccctgccctatattccatcctttgcttttcatcccccactggccttgcaccgttttagggcaccggattgatgaaaatgcgcgcaaaagtaaaaagattgtaataatcacctcacacaatcgttacgtcgagattgttttcccatcagggtttgcgctaaaactgggctggtaattcagcacccttatgacgcaccaaaatgacgccccatcatggtgcagtcactgcctgaaatgatcgttcttgtgcaacgacttacgcttcgtttgttgaaaaacaacagcttgtaaaagtggcacgattttttcattaggctagtcgttctcgcaggggatcgtcccgtggatataaaaggaaatgctatgaagtctgtatttaaagtttcactggctgcactgaccctggcttttgcggtttcttcccatgccgccaataagaccctggttgtcgccaccgatacggcgttcgtcccgttcgaatttaagcaaggcgataagtatgtgggttttgacgttgacctgtgggcggctatcgccaaagagctgaagctcgactacaccctgaagccaatggacttcagcggcattatcccggcgctgcaaaccaaaaatatcgatctggcgctggcggggatcaccattaccgacgagcgtaaaaaagcgatcgacttctccgacggctactataaaagcggcctgctggtgatggtcaacgccaataataacgacatcaaagatgtcaaagatctgaacggtaaagtggtcgcggtgaagagcggcaccggctccgttgactacgcgaaagccaatatcaaaaccaaagatctgcgtcagttcccgaatatcgataacgcctatatggagctgggaaccggtcgcgcggatgccgtgctgcacgatacgccgaatattctgtacttcatcaaaaccgcgggcaacggtaagttcaaagcggtaggcgaatcactggaagcgcaaaactacggtatcgccttcccgaaaggcagcgacgagctgcgtgagaaagtgaacggtgcgctgaaaacgctgcgcgacaatggtacctataacgaaatttataaaaaatggttcggcactgaacccaaataataaaaacgtacttcgccggaccgaggtccggcgacaccacaacggtcttccggcacaggctcggcgggagacggtattttggcggaggctttcctctgctctcgacacggtaacaggaacgtattatgcagtttgactggagtgccatctggcctgccattccgattttgctggaaggcgccaaaatgacgctgtggatttccgtcctcggcctggccggcggtctgataattggtctggtggccggtttcgcccgctgcttcggcggctggatcgccaaccacatcgcgctggtctttattgaaatcattcgcggcaccccgattgtggtgcaggttatgttcatctactttgcgctgccgatggcctttagcgatctgcgcatcgaccccttctccgcggcggtagtgaccatcatgataaactcgggcgcctatatcgcggaaatcacccgcggcgcggtgctctccatacataaaggcttccgcgaagcgggcctggcgcttggcctgtcgcgtcgcgaaaccattcgccacgtgatcctgccgctggcgctgcgccgcatgctgccgccgctgggcaaccagtggatcatcagcatcaaggatacctcgctgttcatcgtcatcggcgtcgccgaactgacccgtcagggacaggagatcatcgcgggcaacttccgcgcgctggaaatctggagcgccgtagccgtgatctacctgattatcaccctggtcctgagctttattctgcgtcgtcttgaaagaaggatgaaaatcctgtgattgaatttaaaaacgtctccaagcactttggtccgacccaggtgctacacgatatctctctgaaaattaatcagggtgaagtggtggtcattatcggcccttccggttccggtaaatcaacgatgctgcgctgcatcaataagctggaagagatcaccagcggcgatctgattgtcgatggtctgaaggtcaacgacccgaaggtggacgaacgtctgattcgtcaggaagccgggatggttttccagcagttttatctgttcccgcacctcacggcgctggaaaacgtgatgtttggcccgctgcgggtacgcggcgccagcaagcaggcggcagagaagcaggcgaaagagctgctggcgaaagtcggtctggctgagcgcgcgcatcactatccgtccgaactctccggcggccagcaacagcgtgtggccatcgcccgcgcgctggcggtgaagccgaagatgatgctgtttgatgaaccgacctccgcgctcgacccggagctgcgccatgaagtgctcaaggtgatgcaggacctggcggaagagggcatgacgatggtgattgtgacccacgaaatcggctttgccgaaaaagtggcctcgcgactaatctttatcgacaaaggacgaattgctgaagacggcaatccccaggagctggtgaagaacccgcccagcccgcgcctgcgtgaattcctgcaacacgtcgcctgacccacaacggctctctctcccacgatgagagccgcttttccagaatcctcttccctccccttccgccagcggcttctatacttacccgtttacgttgcaacggaggtgcccatgccgtggatcctgcttttgctcgctgcactgtttactgccccgctttccgccgccaccctccccggcgtgccgacggctaacactgataaaaacagcgccagcgaacccgatgtggaacagaaaagagcggcttatgccgcactggccgatgtgctggccaacgactccgcccgtcaggagctcattgaccagctgcgtaaagcagccgccacgccgccgcccgacagcaccccgacgctgacgccaccggcggtgaaagaagagaccacggtactggagaacgtcacccagataagccgggaatatggcgaacagctctcatcacgcttttcccagctgtggcgcaatatcaccggctcaccgcataagccctttaatccgcaaacctttaccagcgcggcctggcattttttactgctggccgggctggtgtttgccttctggtggctggtacgcctcgcggcgctgccgctgtatcgcaaaatgggcgaatggggacggcataaaaatcgcgatcgcggtaactggctccagctgcccctgaccatcgccggggcgtttatcatcgacctgctgctgctggcgctaaccctgtttgtcggtcagctgctaagcgatcgcctgaatgggaataaccctaccatcgccttccagcagagccttttcctcaacgccttcgcgctgatcgagttttttaaagctattctgcggctcattttctgcccgcgcattcctgccctgcggccctttaacctcagcgacgaggccgcgtcatactggagcctgcgcctgagcgcgctcagcagcctgattggttacggtctgatcgtcgcggtgccgattatttccaatcaggtgaatgttcaggttggcgcgctggctaacgtcgtcatcatgctgtgcattacgctgtgggcgctgtacctgatttttcataacaaagcggtgattactcaagggttgatccacctggccgaccactcactcgctttctttagcctgtttatccgcgccttcgcgctggtctggcactggctggcctgcgcctactttgtggtgctttttttcttttcccttttcgacccgggcaacagcctgaaattcatgatgggcgccaccctgcaaagcctggcgattatcggcggcgcggcgctggtgtctggcatcctgtcgcgctggatagccaaaaccatcaccctgtcgcccgccactcagcgcaactatcctgaactgcaaaagcggctgaatggctggatctccgcctcgctgaaggcggcgcgcattctcaccgtctgtgtcgccatcatgctgctgttgagcgcctggggcctgtttgacttccgggaatggctgcacaacgatgcggggcaaaaaacggtggatgtgctgatccgcatcgccctgatcctcttcttctccgccatcggctggacggttctggccagcctgattgaaaaccggctggcatcggatattcatggccgtccgctgcccagcgcgcgggcccggacgctgctgacgctgtttcgcaacgcgctggcggtggtgatcagcaccatcacggtgatgatcctgctctcggaaattggggtaaacattgcgccgctgctggcgggcgccggggcgttagggctggccatttcgtttggtgcgcaaaccctggtcaaagacattatcactggcatatttatccagtttgagaacgggatgaacaccggcgacctggtcaccatcggccctttgaccggcaccgtggaacgaatgtcgattcgctccgtgggggtacgtcaggataccggcgcctatcacattattccctggtcctcgatcaccacctttgccaacttcgtgcgcggcattggctcggttgtggctaactatgacgttgaccgccatgaggatctggataaagccagccaggcgctgaaggcagcggtggacgatctgctggcccaggaggagatccgcggtctgatcattggcgaaccgtcgttcgccgggctggtggggctgagcaataccgcctttacgctacgcgtcagcttcaccaccctgccgctgaagcagtggacggtgcgttttgccctcgacacccaggtgaaaaagcacttcgaccgcgccggggttcgcgcgccggtacagacctggcagcagctgccgatgccgggcgccgacagcccggccgccgagtagcgttagaatggacgacggcgtttggcgtcgtccataaagctccaggcgataaagcgactttgcttttgcccctgggccatctcctttttcaccactttcactgcgccgacctcggtcagcaggcggtagagcggcggcagattatcgccacgcgacaccagcgaggtaaaccatttcacctggcgggcgaaggcctggctttcgcggatcatctgcgagataaaggctacttcgcccccttcgcaccacagctcctgctgttgaccgccaaaattgaggccactttcggcgccgagtccgaggttgcggcgcttgcgctcgccccccgcccgggcgctctctgcggagtcatggaacggcggattacacagcgtggcgtcgtaggtctcgtttttatggatcacgccgtgaaagatagcctggctctctttttgccggcgcaggcggatctgccgggtcaagcccgggttgccattgataatcgcctgcgcgctggcgaacgcctgcgggttgatttcactgccggtaaagcgccagccatactcgtgagcgccgatcaggggatagatgaggttggcgccggtgccaatatcaaggatcgtggcatccttcggcacctcgccgctatccccggccagcagatccgccagatgatgaatatagtcggcccgcccaggcaccggcggacagagaaagccgtcaggaatgtcccagtgtttgaccgcgtagaaatgcgccagcagcgctttattcaacgccttcaccgcctgcggattggcaaaatcaatggtctgctcacccagcggattgagcgtaatgtagccctgcaggtcaggatgggcctggcagagcgcgggcaggtcgtagcgttgatggtggcggttacgcgggtgtaaccccggtttctgggctttcatgacaatctcctttgaacagccgcgtaagatacccgttgacggcggcgcggtaaataagggagtctggatatctccattatccgtgacaggtgcagcatgtacttttatcaaccttcgcagggccacggcctgccgcatgacccgctgaacgcgataatcgggcctcgcccgataggctggatcgcctcccaggacgccgagggccagcgtaatctggcgccatacagcttttttaactgctttaactatcggccgccaatcattggtttcgccagtagcggctggaaagacagcgtgcgaaatatcgtcgaaacaaaggagttcgtctggaacctggcgacgcgaccgctggccatggcgatgaatgaaacgtcagcctcgattccgcaccatgaggacgaattcgtgcgcgccggcctcaccgccgccgccagccgcctggtcagcgctccacgggtcgcggagagtccggtgaactttgagtgccgtctgtcgcagtgtattcaactcaccaccgccgacggcaaccctgtcgatacgtggctggtgctcggtgaagtggtcgccgtgcatatcgatgaatcactactggacaacggtatctatcaaaccgcccgcgcccagccgatcctgcgcgccggtggcccgagcgcctattacggtattgatgacagcctgcgctttgacatgatccgccctgacgcccgctaaataatctaccggccagagtagcgctcccctgcgccggtagcatgcaaaacgcactgttttgcattaaacattccctgtcgcgcggtctggaaagacctacacttaagctatgtcccatgcggtttatgaggatatgctgatgaaattcgtctcgctgctgttcgccgcggcgctcaccgctcatgccaccgcggcctctcccctgccaccgccacccgtactgccctatgccgggccgctccgccctgtcggcaccgtctccgccttcggcgccagcaccctggacgacctggcggccgccctcgcggataaggcccaccgtcatggggcgatagcctggcggatcaatgccgccagcagcggtaaccggctgtacggttcagctataatttatcaataaccttttacaggaggcagacgatggcatcaggttgggcaggcgacggcgccgtacaggatcagatcgacagcactattgacgatgcggtggctcgcgcccgccgcgagcttccgcgcggcgaaagcaacaaattttgtgatgaatgcggagagccgattccggaggcccgtcgacaggccatcccaggggtcagatactgcgtgaagtgccagcaggagaaagatttacataacaatacattttcaggatataatcgtcgcggatccaaggatagccagctacgctgactttcctttaccgtttatgacagcctttcgcattatcttttcgcgcacattttttggcggaaaaagtcgcaatatgtgcccttaaacgcgtcggtcttcctcgctacgcttcgtgacgaaaagaatgagaaataatttattaataatcagtaaattattaatcattcaaaaaattcgatgaagactgtgaatttccttcgattttatctcccgcagaaaagcgtgatacttatcacatcgacggaacatcgtcccctgaacagaacaacctgcgagagattaactatgaaaaacatcaaatatgctgccgctgccatcgctctgaccgctctttccttcggcgcctttgccgccgaaccggttacccccgctcaggctgaaagcatgaataagatcggcgtggtgtctgcgcaaggcgcaaccactttagatggtctggaagcaaaactggctgctaaagccgaagccgctggcgcgaccggctacagcattacttccgctaacaccaacaacaaactgagcggtactgcggttatctataaataatcgctgcacccatctgtaagccactgaattaaccctgaaaagacctttaatacccttgccttgcccgtccgagccaccggacgggcttttttttatcctgcagatccgatcaccaatagtcgttgacgcggctgaggccctgctccagcgaggtcacttccccgcaggccagcagacagcaggcaagctggatcttcaacgagttgggcaccggttcgacgccagcgacgcagcgttcaatccagcgcgcggtgacctcagggtctttcgaggtcggcaggaccaccgcctccgctgccatctcagtctggcgttcgtacagcacccgcacgccctgctcatcaatcaggctgatctgcggacagcgctgcgggttggcgtacacttcgccctcggtaccatgcatcagcagcgcgcggccaccggtctcgcgaaagaagttcgccacccggggaacatattccggatgcgacacgctggagagacgcaatgcctccccttcgccaaacggcgtggccagcttggccagggtatgggcgctgttgcgtacgcccatccgccagcgcatcgccagctgtttctccagcggcggacagaaggcccccaccgggatatacaccggttcatggccctccagctgcgcctgagcctgtccggcgtgcagggtggccggaatgtccagcagggtaaaaatggtttcggtcagcacccgggtgggatcgtgactgacgccgtgaaccaccaccggaaatcccagcttgtgcaggagcatcgccagcagcggcgtgaggttcgcctgcttgcgcgcgccgttgtagctggggataacgatcggcatcggcttgccggccggcggggtcaggcgcagcgtatgctgctgcatcgcggcgtaaaaacctttcatctccgcttcgccttcgcctttaatgcgcagggcgattaatattccccccagctccagctccggcacctcgctgttcagcatccgcgcgtagagcgcacgggcggtctcttcatcgagatcgcgggcatgattcttaccgcgacccacctcttttataattttgctgtactccatggctccccctggtgcatcacgcgccggcgtcagcgacgtttgcggcccgtctgttttgctgtctgttttgctttccgttttactataacctccggaacgcccggctgctctatgggaaaaacaggtaacgcgttcagtagacgcgcgccgtagtttttggtcaacagacgcttatcgtaaatcaccacctctccccagcagttatggctacggatcaaacgccccacctgctgaataagattaaaggaggcgctgggcaaactctgtacctcgaagggataacgattgaggcttttcagccattcgccttcggtgatcactaccgggctgtcgatgggcggaaaagcgattttatggatatgcacctggcttagcagatcgccttttaaatcgagaccttcggcaaaggactgcagacccaccagcacgctgcgctcgccgctttccacccgtttgcgatgcagctccaccagccggtagcgcggctggtcgccctgcaccaacagcatcaggcgcagatcggtcacatgctcgaggaagcggttcatcgcccgcccgctggcaaacagcaccagcatcccgagatgttttttgctctccacctgctggcgaaaataggccgccatctcggcaatgtgctgctcttcgttatccatcagcggttcataacgcatttgaggaataataattttcccctgctccacgtggttgaacggcgaatccagcgccacgaagcggtcccccgctttctccttcagaccgctcatctcctgcaggcgcgagaagctgtttagcgagcgcagcgtcgctgacgtcaccacgatatgcggcacgctgcgccacagcagccgttcaagctgatcgctgacgcggatcccgacgcagtggaaccagacgtggatctggccatcgcgcaccacccgcgtcgcccatttggttaccggcgcgcctgaggactgcgccagcgacgccaggcgccacagcttgctttggctttcaaacatgccaagggcgcggttcatctgcagcagcacccgatgcaggcgcaccacgtcatggctgccggtcttttcgctgagatcgttcaggaacagctccgccaggccgcgcagcaactcggtgagcttcgccagccgctggcagatctccatcacctcctgcggcagttcgcccatcgggaagcgatgctccgcttcctgaccggcgggcatatagagattgagaatattattcaacgaggcaatcagctcgaacagctcttcgcaatgagcggtgagccgctccggattggccagcggcggcgtggttttcggacgaaactgctccatgcaggtggccaccagcttgcagaacagatccagctgcaggcgaaaccagggggcggtgatctcggcgctcatctccagcgcgtcgcgggcgacgtccggcagatgatggccttcatcgaggaccagcagcaggtttttcggctccggcagcaccgcttcgctctccatcgccgccatcaccagcgcatggttggccaccaccacttccgcctcctgaatttcccgccgcgccacaaagaacgggcactcgcgatagtagtggcagttgcggttcaggcagctggccttatcggtgctcagccggctccatagcccatcgtcgatggctttgtcggtatggtcgcgcaggccgtcccagcggtagctgtcgagatcctgcttcagggtcgcgcacagcttctgctccgcctgattattcggggtgagatcgtcatcgagaaaggccagcagatcctgctgcgacggctcggtgctggccagcgccgtcaggttgcgcggacagacgtagcgtccgcggccaaaggcggcggtgaagcgcaggtcgggaatgattttacgcagcagcggcaggtccttactgtagatttgatcctgcagggcgacgttggcggtgctgaccaccagcgttttttgttcctcgcgggcgatggcgatgcccgggatcagatatgacagcgttttgccgacaccggtcggcgcttcgatagccagatgcctgccctcttccccggcaagggttttcgccacatcggcgatcatctgccgctgcgggggacgcggaataaagtccgggatctgttcctgaagcgccttataccaggcggcgatttgcgctttcagcgcagcggtcaaagccatgagaaaacctgaatactgtataaacagccactattgtgccatttttgcccgcccggaggtattgctttctgcggagtgtggaagcctgctcgacaaatagtgtaatggaaagaaaaaggcccgccgccgcgtagcggacagacgggcctgagccggggcgcgttatcgcggcccggacatcagcgtgttattcgccagccggtttacgcgggcgacggcggcgcggcggtttgccgtcctgagtgcgcgctttcggcgcctcgccgtcctgacggcgcggggcattattctggctgcgcggctgtccgctgcgtccctgaccctggccgccgcgtccctgaccttgcccacgaccgccgccgcgctgctggcgaccgttctggataggttcggctttaatggacggatccggctcatagccggcaatcgcgatgcgcgggatctcttttttcagcaggcgctcgatatcgcgcagcagcttatgctcatccacgcacaccaatgataaggcttcgccggtggccgccgcgcgaccggtacggccgatacggtggacgtaatcttccggtacgttcggcagctcgtagttcaccacgtgcggcagctcttcgatatccagaccgcgggcggcgatatcggtcgccaccagcacgcgaatgccgccggatttaaagtcggccagcgcgcgggtacgcgctccctggctcttgttgccatggatcgccgcgctgcggatgccgtctttgttgagctgttccgcgaggtggttggcgccatgcttggtacgggtaaacaccagcacctgctgccagttaccttcgccgataagctgcgacagcagttcacgcttgcggttcttgtcaacaaaatggacgtgctgggtgatctgctcggacgcggtgttacgacgcgccacttccacttccagcgggttgtgcagcagtttctcggccaggcccttgatctcgtcggagaaggtcgccgagaacagcaggttctgtcgacgcgccggcagtttggccagtacgcgacggatgtcatggataaagcccatatccagcatgcggtccgcttcgtccagcacgaggatttctactttatcaagactgacggcgttctgatgttcaagatccagcagacggcccggggtggcgacgaggatgtcgacgccgccgcgcagcttcatcatctgcgggttgatgctcacgccgccaaagaccaccagcgagcgaatattcaggtatttactgtaatcgcggacgttctcgcccacctgcgccgccagctcacgggtcggggtcaggatcagcgcgcgcaccggacgacggccctttgcgtgcggctcattctggatcaggcgctgcagcagcggcagggtaaagcccgccgttttaccggtgccggtctgggcgctagccatcaggtcacggccctgcagtaccgccgggatcgcctgctgctggataggggtcggctcaacgtagccctgctcagcgacagcgcgcaggatatcgggattcaggccaagggaatcaaaagacataacaactccgaaccgccccggcccggtgaagggcgtagttttcagggagattattgcgataagagatggcaaaaaccacaatgccatgaaggggcgcagtctagcagattttgtgacaggccgcataaaatctgcaaaagaatgccgcgcctggctggcgggcatgagaaggccgctgagcgcgctcagcggccagtgggtcatagcagcgcggttaacgcagacgatacttaattttttcgacaatcttcgcggtggagatgccgtagcgatcgtggagggtcggcagggcgccggctaacaggaacgcgtcgggcagccccacgctatccagctcacagcgtacgcccttacgcatcagcagcgcggccaccgcttcccccaggccgccgaccgcggtgtggttctccgcagttaccaccaggcggcccggcttcgacgcctgttcaataatcgctttctcatccagcggtttgatggtcggcacgtgcaggaccgccacgccgatattatcggcccgcagcttttcagccgcctccagcgcgcgcatggtcatcagcccggaggagataatcagcacatcgttgccgtcctccagcagcttcgccttacccagttcgaactgatagtcatatttatccagcaccagcggcaccttaccgcgcagcagacgcatatacaccggcccctggtgatcggcaatggccggtaccgcctgctctatctccagcgcatcgcaaggatcgacgataaccatcccggggataccgcgcatgatcgccagatcttcggtggcctgatggctggggccatagccggtcgtcaggcccggcagcgccgcgcagatcttcacgttcagatgctcttcggcgatgacctggtgaataaaatcataggcgcgacgggttgcaaaggcggcataggtggtggcgaaaggaataaatccctccttcgccatcccccctgccgccgccatcagcagctgttcggccatgcccatctggaaaaagcgatccgggaaggcctgggcgaaaatatgcaggtcggtatattttgacagatccgcggtcatgccgacgatgtccgggcgctgcgccgccagttttgacagcgcgacgccgaagggcgcagggacggtcgcctggccttcatcagcaatcgaggcgaacatcgccgacgtttttaaacggggttgactctggctcattacagcactccttccggtttgttagcgtccagcaccgcgatcgctttttgccattcgtcggcatcgacgcgaataaaatggtttttatcgcgggtttcgaggaacggcacccctttgcccatcagcgtgtcgcataaaatgacccgcggctgattgccggaataacttttcgcgttgtcaaaggcggccatcaccgccggcagatcgttaccgtccacgcgctgtacgtaccagccgaaggcggcccatttatcctgcagcggctcaaagccgaggattttgcgtgaatcgccgtcagcctgctgtttgttgacatcgacaaggttaatcaggttgctcaggccatagtgagccgccgacatcgccgcctcccaggtcgacccttcgtccagctccccatcggacatggagttgtagacccaggccttgctctgtttctgccgcagcccaagcgccatgccgacggcaatggacagtccctgccccagcgagccgccggacatctccatccccggggtgtaggtcgccatgccggacatcggcaggcggctgtcgtcggagccgtaggtttccagttcggcttccgggataatgcccgcctccagcagcgcggcataataagcgatagcgtaatggccatgagagagcaggaagcgatcgcgcccctcccactcgggatcttccgggcgataggtcatggcatggctgaaggcggtggcgagcacatcggcatagcccagcgcctggccgatatagccctgcccctgcacttcccccatttgcagggcgtaacggcgaatacgccacgccgccgcggcgactttttgtgattcggtcatcttcatctgtttgcctcgcttagtgaattaacatgccgccgttaacgtccagggtgatgccggtggagtaggaggaaagatcgctgccgaggaacagcgcggcgcgcgcgatgtctatcgcgtcgccaaggcggttcatcggaatgccggcaagaatgttggccgtcatgtcatcagtcagcttgccggcggtaatgtcggtctgaatcagccccggggtgatgcagttaacgcggacgttatccgggccaagctcgcgcgccatcgcccgcgccagacccagcaccccggcttttgccgcgctgtagtgcggtccgccaaagataccgccgccgcgctgggcggagacggacgagatgcagacgatgctgccggatttttgcgcccgcatggtggggataaccgcctgcgacatcagcagcgtaccgcgcaggctaacatcaagcaccgcgtcatagttggcgcgcttgatatccatcagcttcagcggctgggtaatcccggcgttattgaccagtacatcaacccgaccgtatttcgccaggatctgttcgatggccgcctgcacctgcacttcatcagcgacgttggctgccaggccgagatggccttcgcctaatgccgccgcggcggttttactggcttcgccattgaggtcgataatgaccactttcgcgccgttttcggcgaataatttcgcagtcgcgaagcccaaaccgcgtgcggaggccgcgccagtaataatggcgactttatcttttaataacatagtttcactccatgacattacgtcatattaattaacaggatatatttccgttattgtggttcatcgaggaaaagaatcaccaccaaaccaatggcggcgcagataccaaaataggtaaatacagaattaaaactcccggttttatcaagcaagaaaccagccgccatcggcgcgacaaatccaccgaggttgccgccgctattaattatggaagaggcgattggataggttttgctatccgaaacggccataccgtacgcggtaaaggctggccagccgatatttaaacaaaagccgacaaagaataatccaatacaaactgccagggtgctggccgggatattcagcataattagcatcatgaccaccgttgacaccgcagtgaacatcatggtgggtttacgccggcggcctaatagcttatccgaaacccatccgccgccgatcgcgccaataaagccgccgatgcacggcatactggccacgaagcccatactcattacatcgaaaccgcgctctttgactaaatacagggggatccaggttaataatccgtacagcacgctaaccatcataaaatacgccaggcagtcaccgagaatattttttgaggtgaataagcctttcgccgtatcaattggcgccattttctttacccgaatgattttatccagccaggtgaatctttcggcaattaagatattttcgcgtacgctattatcatgactttcacgcccggcattaatctctgccagttcgctttgggaaacaaatccgctctcagcaggcttggatttgaccagcagataccacgcgatggccgccacaattccgggtatcgcgaaggagaaaaagacccaccgccagccccaggtcaccgcaatccacaccgccagcggcggcacaataatcggcgcaaacatggtcgccgcgatgtaaacgccggttgccgtggctttctcctttggtggaaaccagttatttatggtggaagccagccccaccgggcaaggcccttcgctcagccccagtcccagccgcaccagcttcaggccaaacacggagctcaccgtgcccatcagccaggtaaaggcggagaagccgaaaatggagagcgataccagcccccgggtaccgcgtttggcgatgaaaaagccggccgggatctggcttaccgcatagccgaggaaaaacatactggcgatggccccggcttcaaaattattgatatgaaactcatcaatgatgaaaggcagtaccgcgccaatattcgttcggtcggcgtaattgatggcatacaccagaaaaatcatcgtcaaaaccacgaaacgatatttcgttttcctggcgtcagtacagaccagcgtatctatacgtgacatagggtttcctcgttttatacctcatccacttcgctgtaagctgccgcttcggatcaccgcgttttactatccatacaggagcaagagataaatgcttttcgccagcgaaacaggtggttaggtgttttataattgcgatgcaagcacatcgcagtttgttatcaggcctgtgagaggaatataacaaccccaaaatgaaacggtattcaaaaaacctcaattatgattgagaaaaattgagttagtgacttcccgcaaatttttagcgtttactgacctgcgcgcttttaacaagataaattgttaagcccatcacaaattaacgttgttttttcgcttttccctatgctgtacatcccggctgcgccacgctgttcgctattttcttttattcgcgccccgcgcaggatgccgccatgagccaaccgctacccaataaaaatctgccgatgccctctttacgcaatatccaggcttttattgaagtcgccgctaccggcagccttaatctggccgcagagaatctcaatattaccgcctcggcggtcagccatcagatagccagcctggagcactttctggggaaaaaactgttctcccgcagcagcaaaggcgtcacgttaacggcggtgggagaaaaatatctcaaagaggtctccggggcgctgaatatgattggccaggccaccagccaggtgatcaacgatatccatcaggattatttacgcattcattcggcgccgagcttcggcctgctatggctgatgccccgtctggataaattccgccaggcgtggccggcgttaaaaatcagcctgacctgttcatacgaaagcatccagttctcccgggataatattgatatcgatattcgtcacgggctgtcacagtggccgacgttgctggtcagaaccattaaaaatgagcgcgtcctgccctacagcgcagcgtcttatttagccagccatcctgtgcaggctgtggaagatctgctggcctgcgatctgatccactccgacagcaccttgattaactggagcaactggctgtcgtggcacaaggtccgcggctggcataaaaacttcatttttaatttcgaccggtcatatatgagcatcgaggcggccagaatggggatgggcgtgatcctcgagagcaatctgctggccggcggacacgtgcgccagggacagctgacgccggtatttgccgacgagcggagcatgccggtcggcgcgcaccacttcgtcctcccccacgctaatgaacagaaggagaaggtccagcgcttcttcgcctgggtcgccggagagctgaaagaggaagggttccatatttgatcccggctggtggacaaaccgccagtcggcgcctaaagttaatcaatcgattgattaatttttaccgagcgcgatgaccagtaaaggcgaacaggcaaaaaatcagcttatcgcggccgctatcgcccagtttggcgagtacggccagcacgccaccacccgcgatatcgccgcccaggccgggcagaatatcgccgctatcacctattattttggctcgaaagacgatctgtatcttgcctgcgcccagtggatcgccgattttatcggcgacaattttcgcccgcaggccgaagcggcggagcacctgcttgccggggaagcgccggatcgccaggcgatccgcgacctcatccttagcgcctgccacaacatgatcctgctgctcacccaggacgatacggttaacttaagcaaattcatttcccgtgagcagctggcgccgaccgccgcctaccatctgatccaccagcaggtgattgcccccctgcaccattatctcacccggctgattgccgcctggaccggctgcgaagccagtgatacgcaaatgatcctccatacccacgccctgctgggcgaggtgctcgctttccgtctcgggcgtgaaactatcctgctgcgcaccggctggacgcagtttgacgcgcaaaaaacggaacagattttcgaagtcattacctgtcatatcgatttcatcctgcatgggttatcgcaaaggagtttgggctgatgaaaaaacccgtcgtcgtcattctgctgatcgtgattcttctcgccgcgctgggcggcggctggtggtggtaccagagcagccggcagcagccgctgaccctgtatggcaatgtcgatatccgcaccgtcaacatgagcttccgcgttggcggtaggctggcctcgctgaccgtcgacgaaggcgacagcatccgcgccgggcaaactctcggcgagcttgaccgcgcgccgtatgaaaatgccctgctgcaggcccaggccaatgtctccaccgcccaggcgcagtatgacctgatgatggccggctaccgcgcggaagagattgcccaggccgcggcggcggtgaaacaggcgcaggccgcttacgactatgcgcaaaacttttatcagcgccagctcgggctgcgcgccagcagcgccatttccgccaacgatctggagaatgcccgctcctcgcgcgatcaggcgcaggcaacgctcaaatcggcgcaggataagctgcgtcagtatcgcgccggtaaccgcccgcaggagattgcccaggccaaagccagtctggaacaggcgcaggcggcgctggcccaggccaaactggacctgcacgataccgtgctcaccgccccttctgacggtacgctgatgacccgcgccgtcgagcccggcactatgctcaacgccggcggtaccgtactgacgctgtcgttaacgcatccggtgtgggtccgcgcctatgttgacgagaaaaacctcggccaggcgcagccgggacaagaagtgctgctctataccgacagccggccggataagccctatcacggcaaaatcggttttgtctcgccgagcgctgaattcacgccgaagaccgtcgagaccccggatctgcgcaccgatctggtctaccgtctgcgcattgtggtgactgatgccgacggcgcgctgcgccagggaatgccggtgaccatctcctttagccacgggaacggacatgagtgagaccgtcatcgccttaaacggcctgagccgccgttttcccggtatggacaggccagcggtagcgccgctcacctgcacgatccgcgccggctacgtcaccgggctggtggggcccgacggcgcggggaaaaccaccctgatgcgaatgctcgccggattgctcaagcctgatgagggccgcgccagcgtgataggcttcgacccgctaaaagacgacagcgccctgcacgcggtgctcggctatatgccacagaagttcggcctgtatgaagatctgacggtgatggaaaacctgaccctgtacgccgacctgcgcagcgtcaccggcgaggcgcggaagaaaattttcgaccgcctgctggagttcacctcccttggtccattcaccgaacggctggcaggcaagctttccggcgggatgaagcaaaagctgggcctcgcctgtaccctggtgggcgatccgaaagtactgctgctcgatgagcccggcgtcggcgtcgaccctatctcgcgccgcgagctatggcagatggtgcacgagctggccggcgacggcatgctgatcctgtggagcacctcctatctcgatgaagccgagcagtgtcgcgatgtgctgctgatgaacgaaggcaaactgctctatcaaggggagccgacggcgctgacgcaaaccatggccgggcgcagctttctggtctccagcccgcaggagaacaaccgccgcctgctgcagcgggcgctgaagctgccgcaggttagcgacggggtgatccagggcaaatcggtgcgtctgatcctgaaaaaggacgcgcgcattgaggaagtccagcagcatggcgacatgccgcccctgcaggtggccgacaccgcgccgcgctttgaagatgcgtttatcgacctgctcggcggcgccgggaccgctgaatcgccgttgggggcgattatccatcgcgttgacggcagcaaagaggaaacggtcattgaagcacagtcgttaacgaaaaagtttggtgatttcgccgctaccgaccatgtcgatttccaggttaagcgcggtgaaattttcggcctgctcggccccaacggcgccgggaaatccaccaccttcaaaatgatgtgcggcctgctggtgcccacctccggcaaagcgctggtgctgggaatggatctcaaggtcagctctggcaaggcgcgccagcatctgggctatatggcgcaaaaattttcgctgtacggcaacctcagcgtcgagcaaaacctgcgctttttctccggcgtctatggcctgcgcggccgggcgcaaaatgaaaaaatcgcccggatgagcgatgcctttggcctgaaaagtatcgcccgccacgccgccgacgagctgccgctcggctacaagcagcggctggcgctggcctgctccctgatgcatgaacccgatattctgtttctcgatgaacccacctccggcgtcgatccccttacccgccgcgagttctggctacatatcaatagcatggttgataaaggcgtgacggtaatggtcaccacccacttcatggatgaggcggaatactgcgaccgcatcgggctggtctatcacggcaaacttatcgccagcgggaccccggacgcgctgaaggcccaggcggcggacgacagccagacggacccaaccatggagcaggcgtttattaccctgattaaccgctgggacaaggagaatagccatgggcaatagcattctctcctggcggcgggtccgcgccctgtgcgtcaaagagacccggcagattgtgcgcgatcccagcagttggctgatcgcggtggtgatccccctgctgctgctgtttatcttcggctacggcattaacctcgactccagcaggctgcgggtcggggtattgcttgagcagcagagcgaagaggcgctggatttcgtccataccatgaccggctcgccctatatcgacgccaccgtcagcgacagccgcaggcagctgattgagatgatgcaggccgggcgcatccgcgccatggtggtcattccggtggatttcgaccgccagatggcccgccccggcgccgacgcaccgctgcagctcatcaccgacggcagcgagcccaataccgccaacttcgctcagggctatgtggaaggtatttggcaaatctggcagcagcagcgggcggaagaccgcggcgaaacctttgaaccgctgatcgacgtgcagatgcgctactggtttaacccggcggctattagccagcactttattatccccggggcgatcaccatcatcatgaccgtggtcggcgccatactgacctcgctggtggtggcccgcgaatgggagcgcggcaccatggaggcgctgctgtcgacggagatcacccgcgccgaactgctgctgtgcaagctcattccctactatttcctcggcatgctggcgatgctgttgtgtatgctggtgtcggtatttattctcggcgtgccctatcgcggctcgctgccgatcctgtttgtcattaccagtctgtttttgctcagcaccctggggatggggctgctgatctcaaccattacccgcaaccagtttaacgccgcgcaggtggcgctgaacgccgcctttttaccgtcgattatgctgtccgggtttattttccagatagacagtatgccggcggtgatccgcgcggtgacctatgtgatcccggcgcgctatttcgttagtactctgcaaagcctgtttctggcgggcaatattccggtggtgctgctggtcaacgtgctgtttttgattgcgtcggcggtgatgtttatcggtctgacgtggctgaaaaccaaacggcgtctggattaggttttgtccggtggcgctgcgccgaccgggcctacggtttaaccaacatcgattatacggttcgccgatcccgtaggccgggcaaacgcagtgccgcccggcgtggttgaatgggccaaaggagctattatgtttcaccgtttatggacattaatccgcaaagagctgcagtcgctgctgcgcgagccgcagacgcgggcgattttaatcatgccggtgctgattcaggtgctgctgtttccctttgccgcgacgctggaggtgaccaacgccaccatcgctatctacaacgaggacagcggtcgccacgcggtggaactcactcagcgctttgcccgcgccaaagcctttacccacgtcctgctgctgcaaagcccgcaggcgatccagccgaccatcgatgaacaaaaagctctgctggtggtgcgcttcccggccgatttctcgcgcaatctggataactatcaaaccgccccgctgcagcttctgctcgacggacgcaactccaacagcgcgcaaatcgccgccaactatctgcaacagattgtgaaaaactatcagcaggagctgctggagggtaaagcgaagccgaacaacagcgagctggtggtgcgcaactggtacaacccgaatctcgactataaatggttcgtggtgccgtcgcttatcgccatgatcactaccatcggggtgatgatcgtcacctcgctgtcggtggctcgcgagcgcgagcagggcacccttgaccagctgctggtctcccccctcgccacctggcaaattttcgtcggcaaggcggtgccggcgctgatcgtcgccaccctgcaggcaactatcgtgctggcgattggtatctgggcctatcagatcccgtttgccggctcgctgctgctgttctatttcaccatggtgatttacggtctatcgctggtgggctttggcttattgatttcgtcgctgtgcgccacccagcagcaggcgtttatcggcgtgttcgtctttatgatgccggctattctcctgtcggggtacgtctcaccagtggaaaacatgccgcagtggctgcaggatctgacctggataaatcccatccgccactttaccgatatcaccaagcaaatttatctgaaggatgcgagtctggagattgtgtggggaagtttgtggccgctactggtcatagcggccaccaccggctcagcggcgtatgcgatgttccgaaggaagattgcgtaatacccgtcatcgttcaaactacaacggcgttggctttccttactcaccccagtcgcatagttatctatgcttctggggattcgctgcgttgccgccttgttgtagcccgaacgctttagggtaacggctcttatctttcgccagcagcgagaccaccgccgggcctgccagtatcaccagcccggcgagggccagcagcaggttgttgtgcagcacgcgcgacagcagccacagcgctatcatggccgcgccgaagtaccaggtcgtggtgagctcctcaaggaagtctcccacatcgcgccagcgcgcctcatggtgacgctgtaaaaacagcatcgccagcagcgtgacgctgtagaggacgcacagtcccaatccgacgcgcaccagcgcgccgctcatccaacccatcaccagtactgccacgaccagtagatgcaacataatctgccagcaactaagacccgttgcgacgcgtacacgttgttgccacttcatggcttctctcctgaaggatttttctctgctactcagagtaccgcactttacggaaaattccgtaacaccgcatctttttgtgacgtctactacactattttattcaggaaagtgacatttactggagaattatggctgagccaacggcgggattttcgttgaacgtgctgacaattaacacccataaaggctttacggcgtttaatcggcgttttattttgcccgaactgcgcgacgccgtgcgcagcgttagcgcggatattgtttgcctgcaggaggtgatgggcgctcatgaggtacatccgctgcacatcgaaaactggccggatacgacccattatgaatttctcgccgacaccatgtggagcgactacgcctacgggcgcaatgcggtttatccggaaggccaccacggcaacgccgtgctgtcgcgctttcccattgaatactacgaaaatcgcgatatctcggtcggcaacggggagaagcgcggcctgctgtactgccgcatcgtgccgccgcagagcgggataactattcacgtgatttgcgtccatctcggtctacgcgccgaccaacggcaggcgcagttgaccatgctggcggagtgggtcaataccctgcccgcgggcgagccggtggtggtggctggcgattttaacgactggcgtcagcaggctaaccagccgttaaaagcccaggccggtctggaagagatctttacccgcgcccgcggacggccggcgcgcacctttccggtcagttttccgctgctgcgcctcgaccgcatttacgtcaagaacgcccacgccagtcgcccgaaggcgctggcccttaaacaatggcggcatctgtccgatcatgcaccccttagcgtggagatacatttgtgaaatgtcgttggcaggaaggcaaccgcattacgctactggagaatggcgaccagtactatccggcgctgtttgcggccatcggtcgcgccagccggcgggtgatcctcgaatcctttatctggtttgaagatgaggtaggccggcggctgcacgcggtcctgctcgaggctgcccgccgtggcatccaggtggaggtgctcctcgacggctatggttccccggatctcagcgatgagtttgtcggcgagctcaccgccgctggcgtgattttccgctactacgatccgcgtcctaagctgatggggatgcgcaccaatctgttccgtcgcatgcaccgtaaaatcgtggtaatcgacgacaccaccgcctttgtcggcggtattaactactccgccgaacatatgagcgactacggtccggaggcgaagcaggattatgcggtgcaggtcgaagggccggtggtgctcgacatcctgcagttcgagctggaaaacctgcccaacagcgaaaccgcccgccgctggtggcgacgtcgtcgccaccagccggaggttaaccagacccccggcgaggcgcaggcgctgttcgtctggcgcgacaaccaggatcaccgcgacgatattgaacgccactacctgaagatgctgaccagcgcccgccgggaagtgattatcgctaacgcctattttttccccggctaccgcctgctgcatgcgatgcgcaatgccgcgcggcgcggagtacgggttaagctgatcgtgcagggcgaaccggatattcccattgtgaagtttggcgcccacctgctctatcactatctcgttaagggcggggtgcagatttacgaatatcgccgtcgcccgctgcatggcaaggtcgctctggcagacgaccactgggccaccgttgggtcaagcaacctggatccgctcagcctgtcgctgaatctggaagccaatctgatcatccacgatcgggtgtttaaccagacgctgcgcgataatctcaacgggcttatcgcccgggattgccagcggatcgataaaacgatgctgccgaaacgcaactggtggcggctgggcgtcagcgtgatggctttccactttctacgccacttcccggcatgggtcggctggttaccggctcataccccgcggctggccagagtcagcccgccggtccagccggaaattgaaactcaggaccgcgtcgagtctccagccagggataatccactatgagcaaatcacatccccgctggcggatggcgaaaagagtgctgaccgtgctcttttttatcgccgtcatcgtcctgctggtgatctacgcgcaaaaagtcgactggcaggacgtgtggaaggtgatccgcggctacgatcggctggccttgtttagcgccattgcgctggttatcgtcagctacctcatttacggctgctacgatctgctcggtcgggcctattgcgggcacaagctggcgaaacgccaggtcatgctggtgtcgtttatctgctacgccttcaacctgacactcagcacctgggtcggcgggatcggtatgcgctaccggctgtactcgcggctggggctgaacggcagcaccatcacccgtattttttccttaagcattaccaccaactggttgggctatattctgctgggcggggtgatattcacggcagatctggtgaagctgccgccgcactggtacatcagccagaccactctgcgtattatcggcggggtgatgctgatccttacgctttgctatctgttcggctgcgcgttcgccaaacgccgtcacctgacgattaaaggccagcggctggtgctgccctcctggcgcttcgcgctgctgcagatggggctctcggcggcgaactggatggcgatgggggcgataatctggctgctgttgggcagcgagattaactattttctggtattaggggtgctgctggtgagcagtatcgccggggtgattatccatattccggctgggatcggcgtgctggaggcggtgtttatcgccatgctctccggggaagatatttcgaagggcgcgatcattgccgccctgctcgcctggcgcgcgctctattatttcctgccattgctgctggcgacggtggcctatctgctgctggagagccgggcgaaaaagctacggcaaaagaaccagcgcaagctggcccgcgaatgaaacggccaggccgcgctgcgcttgcacgggcctacggagtgtaagcctgtgagaggatcctgtaggccgggtaaggcgcagccgccacccggcaaaatcaagggtaccgggcctgatgccatcacccggcggcgctgcgcttgcgcgggcctacggagtgtgagcctgtgagaggatcctgtaggccgggtaaggcgcagccgccgcccggcaaaatcaagggtaccgtgcctgaaatctcgcccggcggcgctacgcttgcgcgggcctacggggtgtgagcctgtgagaggatcctgtaggccgggtaaggcgcagccgccacccggcaacatcacgggtatcgtgcctgatatctcgcccggcggcgctgcgcttgccgggcgttcggagatgcaaccccgtgatataaagaggttagcggcggttgcccataatacgcagcagcatcaggaacaggttgatgaagtccagatacagcgttaaggcgccaaggatcgagtatttacgcagcgtggcgctgtcgcgggtatcaatctgctcgccgatgtttttcagcttctgggtgtcatacgccgtcaggccgacaaacagcaccaccccaatataggtcacggcccacatcagcgcctcgctcttcagccacaggttgaccagcgacgccagcacgatgccaatcagccccataaacagcatgctgccgaagccgctcagatcgcgcttcgtggtgtaaccatacaggctcatcgccccaaacatcccgccggtgaccacaaaggtgctggcgatcgatgaataggtataggcgataaaaatgctcgatagcgtcagtccggtcagcgccgaatagagcataaacagcgtggtggccatcccggcgctcagccgctgcaccattcccgacagcacaaacaccagcgccagctgggcaataatcagcccgaagaaagtgattttgctcgaaaagacgaacatcatcaccgccggagtattcgctgcaaaccacgcgataaacgccgtcagcagcaggccgaccgtcatccagccgtacacctgcgccatgtaagtctgcaggccggtacggccctgcactattgaatcggaacgcggatatctgtccatgactctctcctgataaacaaagtttcaccctgtaagcgtatcacactaccagcgctctgccgcctggcgatcgctgtcgcgggcgtcgacccagcgttcgccatccggcgtcgcttcacgcttccagaacggcgcgcgggttttcaggtaatccataataaactcgccggcggcgaaggcgctgccgcggtgagcgctggtgacgccgacaaacacaatctcttcccccggccacatttcgccgatgcgatggataaccgtcacccggcccagcggccagcgctcgcgcgccagctcgacaatttccgccagcgatttttcagtcatccccggatagtgctcgagggtcagcgccttcacgctgtcgccgaggttgtggttacgcactttaccggtgaaggtgaccaccgcgccgtcttcatcgcgttccgccagccagggatattcctcactgacgctaaagcgcgccgggctgaccacgatacgggtttgcgtcatgtcagccccccgttaccggtgggaagaacgccacttcgtcgccgctggccactggatgttcgaaagaggttagcgtctggttaaccgccgccagcagcttgccctcctccagggccagcgcccagcgatcgctgcgggcggcaagctgctgacgaaccgcttcgacagtcgccagttcgctggcatcaagggtcagcgaatcggtaccgaccagctcgcgcacctgggcaaaaaacagaaccttaatcatggcattcacccaccttaaaatcgccggacttaccgccgcttttcgccagcaggcgcaccgggccaatcaccatatccttctgcaccgctttgcacatatcgtaaatggtcagcgcggcaaccgaggcggcggtcaatgcttccatctcaacgccggttttaccggtgagtcggcagagcgattcaatgcgcacccggttatgttccggctgcgcctgcagattgacttccactttgctgagcatcagcggatgacacagcgggatcagctcccaggtgcgtttggccgcctggatcccggcgatacgcgcggtggcaaacacgtcgcctttatggtggctgccgtcgataatcatcgccagggtcgtcgcctgcatttcgacataagcctcggcgcgcgcttcgcgcaccgtttccgctttgccggagacatcgaccatatgggcttcgcccgcggcgttaatatgggtcagttgtgacatagattatttcttcaggtgtggaatgaagttacagggacgggtgcgggcatcaagctgcggggcgatgatgttgtcccacgccgtacggcaggctttggttgagcccggcatggcgaaaatcagcgtgcggttggcgacgccggccacggcccgggactgcagcgtcgaggtgccgatctcttcgaacgacagcatgcggaacacttcgccaaagccttcgacctcacgatcaaacagcggcagcagcgcttccggcgcctgatcgccgtcggtaaaaccggtgccgccggtgatcagcaccacctgcacgttatcgctggctatccacgccgatacctgagcgcggatggcgtagcgattctctttgacgatcgccttctcgacgacttggtgccccgcctcctgcgccgcctcgcgcagccagtgaccggaagtgtcgtcctcttcgccgcgacggctggaaacggtaagaatagcaatacgggtcgggataaactcagcgctagcctggctcatctgaatgctcctttcgaaaacgattaaccgccaatataggacaggttctgcgtaataccggtgttgccctgatgcaggaaatgggtctgctttttatgggttaaggcttcggcgatccgcgcctcaagcgcggcctgctgctggtcttcggccatcaggtcgcgcaggtcgacgccgccttcgccaaacaggcacaggtgcagtttgccaacggacgagacgcgcagccgattgcaggtggcgcagaagtctttttcatacggcatgatgaggccgatctcgccggcgtagtccgggtgacaaaagacctgcgccgggccatcgctgcgctggcggatctgatggatccagccgcggcgcagcagttcatcgcgcagcaccatgccggagagatggtgacggcggaacaggtcgctgccttcaccggtttccatcagctcaataaagcgcagctggatacgacggggttggatccaggcgaggaaggtatcgagctggtgatggttaacatcacgcatcagcacggtattcacctttaccttgtcaaagccggcggcgaaggcggcgtcaatgccgtccatcacctggtggaacttgtcctggccggtgatggcatggaactggcgggcgtcgaggctatcaacgctgacgttaatcgccgtcaggccggcatcgcgccagcgttcgacatcgcgcgccaggcggtaaccgttggtagtgaccgcaatctgacggatcgccgggttttcacgcacggcggcaataatctcggtgaagtcgcggcgcagggagggttccccaccggtgaggcgaactttttcggtgcccagcgcagagaaagcgcgcgtaacccggcgtacttcgtctacgctgagaaagccattgttattgacggcgccgggcttataaccgttcggcaggcagtaggtgcaacggaagttgcacacatcggtaatcgacagacgcaggtaataaaacttacgcgcgaatgcatcggtaagctgtgaggccatatacacctttccaaatacgggagacgcggtcatttctttccacgccctggcgacaaccggcggcgtcgcggccaaatcgccatatcttttgacacaggcgaagaggctagagtgttaacaggttatgtcgatagtagcgcgttacaggcagtttcgccattggcgatttcgctatataatcttatacatatcgctatcttcgtgcattttcgctacagaatagccataaatcatttttttgccttgatgtcggtcagtttgtcgggctcctcccatcgtcttttaggggtagatcgggtagtgtgtggccgtttatgtgaaataaggaatttctatgcgcaatcgtacattcgctgacctcgatcgggtggtcgcgctcggcggcgggcatggtttgggccgggtgatgtcctccctctcctcgctcggctcacggctgaccggcattgtcaccaccaccgataacgggggttccaccgggcggatccgtcgttcggaaggtggcattgcctggggcgatatgcgcaattgcatcaatcagttaattgccgagccgagcgtagcgtcggcgatgtttgagtatcgttttggcggtaacggcgagctttccgggcataacctcggaaatttgatgttaaaggcgctggatcacctgagcgtgcggccgttagaggcgatcaatttgatcagaaacctgctgaaagtggacgctttcctgatcccgatgtcagaacaaccggtggatttgatggcgctcgatcatgaaggccatgaagtttatggcgaagtgaatattgatcagcttgataatgtgccgcaggagctgatgctcaccccgccggtaccggccacccgcgaggcggtggaggctatcgccgaagccgatttgatcctcattgggccgggcagtttttacaccagcctgctgccgatcctgttgctcgacgagatggcccaggcgttgcgccgcaccccggcgccgatggtttttatcgataacctcggcaaagagcatagcccggccgcgaggctgtcgctggcggagcgcatcgcgattatggagcgctatgtaggcaagcgggtggtggatgcggtgatcgccggtccaaaagccgatatcagcggcattgacgaccggttggtgatccagacgccgctggaggccagcgacgttccctatcgtcatgaccgggcgctgctccgcggggcgctggagaaagcgatccagctgccgggctgatcctgcgcgccggaggcggccctcttcggcgcaccttaaaatcttaaggttgtcttaaaatagggctggcactataccctcatctttttctgtgggtgtgcattatgtcgttattgcctctgcgtcggccggtggtcagtcgcacgacttatctgattctctttgcttgctatatcggcatctttctcaacctggctttttatcgccaggttttcccgttactgccggtaaatagcctgcataactggctggtatttctcagtatgccgatcgtggccattagcgtgatgaatatcctcaccactctcgcctcgttcctgaagctggaccggctggtgattagcctgttcattctgctcagcgcctcggcgcaatacttcatctggaactttggcgtggtgatcgaccgcagcatgatcaccaatatcctcgacaccactccggcggaaagctttgctctactctccggcgaaatgattgccgtcctcggcctttccggggttttggcggtattcgtcgcctggtgggtgaaaatccgtaagcccgccacgcggtggcgcggcgcggcgatgcgcctgctcaatatcgccgtttcggcgctgctgattattctggtggccgcgctgttctacaaagattacgcctcggtgttccgtaacaacaaagagctggtgaaatccctgagcccttccaacagcattgtggccgtgaactcctggtatgctcatcatcggatggacaacctgccgctggtgaagattggcgaagatgccacgcagaaagcggtgatgcataacgctccccgtaagaacctgacgatcgtcgtgctcggcgagacttcgcgagcggataacttctcactgggcggctattcgcgcgacaccaacccgctgatgcggcaggacggcgtgatctattttccgcataccacttcctgcggcacggcaaccgcagtttccgtgccgtgcatgttctccaatatgccgcgcgcacattatgatgaagagctggcgcaccatcaggaaggcgtcctggatattctacagcgcgcagggatccgggtgctgtggaacgataatgacggcggctgcaaaggcgcctgcgaccgggtaccacaccagaacgtcaccgacctgaagctcaccgggcagtgcatcgatggcgagtgctacgatgacgtcctgttccataatctcgacagctatatcgataacctgcaacaggatggcattattgtgctgcataccatcggcagccacggtccgacgtactacaatcgctatccagcggcgtttcgcaaattcacgccgacctgcgacaccaatgagatccagggctgtacccgggagcagttgaccaatacctatgacaacaccatcctttatgtcgactatgtcgttgataaagcgataaaactactgcaatctaaacaggataaatttaccactagcctggtttatttgtccgaccacggcgaatcgctgggagaagatggcgtctatttgcatggtctaccgtattccatcgcgccggatacgcagaaacatgtgccgatggcgctgtggctctccgccgactaccagcagcgctacggcatttccgcgcactgtctgcagcagcgggcgcaaaaagagaattactcgcaggataatctgttctccaccctgctcggcctgctcggcgtcagcacccgcgagtaccaggcggcagatgatatcttaacgccatgtagagaggctggttgatgaaaatcttagtcattgaagacgatgcgctgctgttgcaggggttaattctggcgatgcaaagtgaaggatacgtgtgcgacggcgtctccaccgcgcacgaagccgcgctatcgctggccagcaatcattacagcctgatcgtgctggatctcggcctgccggatgaagacgggctgcattttctctcccgcatgcggcgggagaaaatgacccagccggtgctgatcctcaccgcccgcgatacgcttgaggatcgcattagcggtctcgataccggggcggatgactacctggtaaaaccctttgccctggaggaactcaatgcgcgcattcgcgccctgctccgccggcataacaaccagggcgataatgaaatcagcgtcggcaatctgcgccttaacgtcactcgccgcctggtgtggctgggtgaaacggcgctggatcttacgccgaaagagtatgccctgctgtcgcggctgatgatgaaagccggtagcccggtgcatcgcgagatcctctacaacgacatttacagctgggacaacgagccggcgaccaataccctggaagtgcatattcacaacctacgcgaaaagattggcaaatcgcggatccgcaccgtccggggctttggctatatgctggctaacaacatcgacacggaatagaccatggctctgtttgcaactgaaacctggaccatgcgccaccggctgctgctgaccatcggcgccatcctggtggtctgccagctgataagcgtcttctggctatggcatgagagcaaagagcagatccagctgctggtggccagcgccatcgaagggcacaacaaccagaaacatgtggagcatgaggtacgggaagcggttgccagcctgctggtgccgagcctgctgatcgttggcctggcgctgtatatcagcatgctggcggtgcgcaagatcacccgcccgctttcacgactgcaaagcgaactggagaaccgcacgccggacaacctcactcctatcgtactcagcgaatcggtgcccgaagtcacggcggtgaccaccgccctgaatcagttggtttcccgcctcaatctgaccctcgaccgcgagcggctgtttaccgccgacgtggcgcatgagctacgcaccccgctggccgggctgcggctgcaccttgagctgctggcgaaagtgcatggcatgggcgtcgacccgctgatccagcgtctcgatcagatgaccaccagcatttcccagctgctgcagctggcgcgcgtcggccagtccttctccgccggcagctaccagcaggtgctgttgctggatgacgtggtaaaaccgctgcaggacgaactggaggctatgctggcgcagcgtcagcagcggctgctgctgacggatatcgaaaacgaggccgtcgtctctggcgatgcgacgttaatcggcgtgatcctgcgcaatctggtggagaatgctcaccgctacagccctgaagggtcgacgatccgcgtgtcggtgaaagcgggcctgatgccggtgatggcggtggaagatgaagggccggggatcgatgaggcgaaaagcggcgaactcagtaaagccttcgtgcgcatggacagtcgctacggcggcattggcctcggactgagcatcgtcacgcgcatcgctcagctgcatgacgcccagttttttttgcataaccgacagccagggccaggggtccgcgcgtgggtgctattcccgcagcgcgggggtcagaacgtcagcacccattgatggaagaaggcaacaataatgaccagggcggtggcgaccgccagatattcacggaagttaattttttgcatgggcgctatcctcatcaggttgaagatagtgtcgcctggcgagattaagcaaacattaagaaggccgcaacgcggccttttttcttctcaaatgtttgttatctggcaagcaggacgataagagaagcgcgccttcactataccccgcacgtccactccgccagtctgcgcccagaatcaggaggcggcgataaacagctcgcgtagctgatgcagctggtcgcgtatttgcgccgcctcctcaaactcgaggttctgcgcgtgctgcatcatctgcccttccagctcgtggattttctgctgcagcgcttttggcgtcatatccacagcgctaagcccggcaggctcaacggccttcgctttaccgcgccctttggctttggttttcgccaggccctggcccagctgcaggatatccaccactttcttattgagcccctgcggcacgatgccgtgctcttcgttgtagcgctgctgtttctcccgtcgacgctcggtctcgccaatggctttggccatggagggggtgatcttatcgccgtagaggatggccttgccgttgacgttgcgcgccgcgcggccgatggtctggatcagcgagcgttcagaacgcaggaagccctctttatccgcatccaggatcgccaccaacgacacctcaggcatatccagcccctcacgcagcaggttgatccccaccagcacgtcaaactcgccaagacgcaggtcgcggatgatttccatgcgctcgacggtgtcgatatccgagtgcagatagcgcacgcgctcgccgtgctcctcaaggtactcggttaagtcctccgccatccgcttggtgagagtggtgaccagcacgcgctcgttgatggccgtgcgcaggcggatctctgacagcagatcgtcgacctgagtcgccaccgggcgcacttcgatgattgggtcaagcagaccggtcggccgcaccacctgatccacaacctcgccgccggatttatccagctcataggcgcccggagtcgccgacacatagatggtttgcggcgccagcgcttcgaattcttcaaacttcatcggccggttatccagcgccgacggcaggcggaaaccgtattccaccagcgtctctttgcgcgcccggtcgccccggtacataccgccgatctgcggcaccgtgacgtgggattcgtcaatcaccagcaggccatccgccggcagatagtcgaacagggtcggcggcggctcgccgggtccgcgcccggagagaaagcgcgagtagttttcaatgcccgagcagtaacccagctcgttcatcatttcgaggtcaaactgggtacgctgggttaagcgctgctcttccagcagcttgttgttggccagcagcaccttgcgccgctccgccagctcaagcttgatctcttccatcgcctggacgatgcgctcccgcggcgttacgtagtgggtcttgggataaatggtatagcgcggcaccgtcccttcgacgtggccggtgagcgggtcgaatagcgacagacgctcgacctcttcgtcaaacagctcaatgcgcagggcgatatcgtcggattccgccgggaagacgtcgatcacctcgccgcgcacgcgaaaagtgccgcgctggaaggcctgatcgttgcgggtatactgcagttcggccagacgacgcaggatcgcccgctggtcaatcagcataccgaccgtcagatgcaacatcattttcagatacaggtccgggtcgccgaggccgtagatcgccgagactgacgccaccaccactacgtcgcgccgctcgagcagcgctttggtggccgacagacgcatctgctcaatatgttcgtttaccgaggcgtccttctcaatgaaggtatctgagctgggaacgtaggcttccggctgatagtaatcgtagtaggagacgaaatactcgacggcattctccgggaaaaactctttcatctcgccgtagagctgagccgccagggttttgtttggcgccagcaccatcgtcggccgctgtaggtcggcaatcacgttggcgatggtaaaggttttaccggagccggtaacccccagtagcgtctgatgcgcaagcccatcctccagcccctcttccaggcggcggatggcttccggttggtctccggaggggcgaaaggcggaatgcagtacaaacgatttactcatcaatcagaacctgaaaaaagaattagcggccggtgtttaattctaccccccggaccgttttttgccaataaattatactggatatttaaacagtacgtacttatgataacgccacaaaagggtcttattggctagcaagctgggtgcaaaacgcgcgtcagacggaataatcctccggccgccagggttatccccagaaaattttaccttttaacatttgtcaagcggacggattaaacttttatggcagcagatgacgcttttcttacacccattgattttatctaacaagctgatatttaagatctttaaagaaaagacgcctttcgcgccaattcagccgcaagccgcgtacgctctagcttgccgcaggttttctaactctaatacacaaggttatccacaggaatagtggataactgtccgcagcccaagaccaccgccgcccggcgcctgtcgccttttgcggtcaaccgcgtggcgaaaaatttttatcgaactatttttgataactatccgcttaaagccgctcgatttttgctgctttttgcaccaccctttagcgtcgggcaccggaaaagtgcagccccggcgctgacgaggcccgatggtatcggcgtttagcgcttttttccgagcgttctttttcctggcaagagttttgcagcatctttctgtcgccctgacgccaggataaggagaaaacgtccatgttgaatttacaggcagtaaatcacttttacggcaaccagcattcgctgtggaatgtcgatctagtactacgcccgggagagtgcattggcgtactgggacgcgagggcatgggaaaaaccaccctggttaactgcattgctggccacctgccggtggctagcggccggatgacctggcatgacattggcgccccgccgcaggatctcacccccctgtccgctcaatcgcgcagcgccattggtatcggctacgtgccacaagataaacgcattttttcccaactcagcgtggaagagaacctgcacatcgccctggcggccgggaaacccggggctaacgccagcggcggcgagatttatgagcattttcccgagctctatgccctacggcagcgcaaaggcgcctcgctgagcgacgacgatcagtaccagctggcgctggccagggcgctgatcgtccagccgcggctgctgatccttgatgaaccctcgcgcggcagagggccgcgctgcctgcaaaagctggcggatctgctgctgcggttaaatcgcgatatcggcctgacggtgctgctcgccgagcagcacctgccctttatccgccgggtggcggatcgcttctgtgtcttgcaccggggccgtaacgtcgccgaaggcgatattatggcgctggatgagccgctgctggcgcagtggataacgccggatccagcgccctgaggtccagatactggccgagatcgtcgcgctgcgcgatatcggcaagccacggtatttcgccgaggaacggcgcggccagtcggtttttcagcgtcgccagatattcggcgtggcgcttgcccggcggctgtacgtcattggcgatccaccccgccagcggtagtcccgcctggcgtaccgcctgagcggtaagcattgcgtggttgatacagccgagcttaacgcccaccaccagaatgaccggcagctgttccgcctgcgcccagtcggcgaaggtcagggaatccgagagcggcgtaaaccagccgccggcgccttccaccaacacccagtcggcgagaccttccagctcacgcagcccgctggagagcctggccgcggcgatcggccgcccttcgtcggcgctgatgatgtgcggggaggtcggctcggcgaaggtataggggttcacctggtcgtaacgcaatgcgacccgactatgacgctgcagcgccagcgcatcttcattacgcagcccatcgccggtaagctcgctaccggaggccaccggcttatagccggcagtgtgaaaacccagcagattcgccgcctgcagcagggcgctgctggcgatggttttaccgacttcagtatcggtcccggtgacaaaaaaacgtttagtcacgctcaatgactcctgtaaaaagagaatacgtcagcgggcagatgccctgccgctgcggccaggccagctgcagctcgcgcagtttgccgcggccaagcggggcggcggtccgcccctggtgcaaatgggtggcgccgatgcccttcagcgagcgcatagcgctcagcgcatcggcgaacggcaggctaatctgatgaacctcgccggtcgcgcgcaggccgctaagcgccgcgcgcaccgccgcttcgctaaggaaacggttggcatgcggccggtcgtcgatggcctgccacgcctgattgagctccggcagcgagtcggcgagcagcgtgctaaacgccactctgccgccgggacgcgccacccggtacagctcgccaattgccgcccgtagatcgtcgcaccactgcaccgccagattgctccacgccagatcgacgcaggcgtccggcagcggcagcgcctcaatatcccccaacagataatgctgcgcggcgtcgttacgctgcgcctgggcgagcatcccggcggagagatccagcgcggtcaccacgctgcccgcctcacgccaatagcgactcatactgccggggccgcagccggcatccagcacctgcgcaaaatcgcggcgcgccagctggcgcagcagtagatcggcgcagcgccgctgcagttcatcatgttgcgtatagccgctggccgcccggccaaacgccgcggccaccgcctgcttattcactgtggccatgcagcacctccagtaaacggttaatgtcttcagcatgatgggcggctgtcagggtcaggcgcaaacgcgcactgccgaccggcaccgtcggtggacggatcgccgttgcccagcagcccgcgtcgcgtagacggcaggccaggttcagcgcccgggcgttgtcgccgacgatcagcggctggatcgcgctgacggagtcggtcaaccccagcgacacctcgcccatcccctcacggaactgacggatgcgggcggccaggatgtcgcgacgctgctgcccttcatcgctgcgaatgatccccagggcagcgctcagcgccaccgcctgggcgggcggcatcgcggtgctgtagatcagatgacgggcaaactgcagcagataatcggccattgcttcgtcgcacagcaccgccgcgccgctgacgccgaaggccttgccgaaggtaaccaccagcagctcagggcgcaccgcctgcgcggcgcagctcccgcgtccttcgtcgccgaccacgccaacaccgtgggcgtcatccaccagcaacactgcccctgcggcctgcgtcgcggcgtgaatggccgccagcggcgcgctgtcgccgtccatgctgaaaatgccttcagtgaccgccaactgttcgcccgccagcggcttagccagcagttgcgcgagctgctgcggatcgttgtgggtaaagcgccgcagctgcgccgggctgaggctcgccgcctccagcagagaggcgtggctcagacggtcggcgacaatccgatcgtctttctccaccagggcggcgatcagcgcctgattcgcggcaaagccggagataaacagcaatgcgcgcggatagcccagccagtcggcgagcgcctcttccagcgcgcggtgggcttcgctatagccgctcacgtggcccgagccgccggcgccgacgccatagcgcgtggccccctgttgccaggcggcgataatcgccggatgctgactcaggcccagatagtcattgctggagaagttaagccagcgctccccttcccgctccagccagcgcccggcgccgtgcgtcaccggcaggcggcggcgaaaagcttccgccgcccgccgctcgtccagcgcccgatcgattcgctcctgccagctcatagcgccgccgcgttgtaatattcctcagtgtccggggtgagtaaggcctgctccagacgctgctgctgctcattgtcgccttccagcaccgccgtctgctgcgggttgatccccagcttgcggaacagctgcaggtctttgtcctcttccgggttcggcgtggtcagcagcttgcagccgtagaaaatcgagttcgccccggccataaagcacatcgcctgggtctgctcgttcatctgctcgcggccggcggagagacgcacgtaggaggtgggcatcatgatgcgcgcgatggcgatagtgcggatgaaatcgaaagcgtcgacgtcgtcgttatccgccagcggcgtgcccttgaccttcaccaacatgttgatcggcacgctctccggcggcgtcggcagattagccagttgcagcagcagtccggcgcgatcttttacgctctctcccagtccgacgatgccgccggagcagactttgatcccagcatcacgcactttgtccagcgtatccaggcgctcctggtaggtacgggtggtgatgatgttgccgtaaaattccggcgaggtatcaaggttgtggttgtagtaatcgaggcccgcttcggccaggcgctgtgcctgactgtcggtcagggtgccgagcgtcatacaggactccagccccagcgccttcacccctttcaccatctgctccaggtaaggcatatcgcggtcattggggtttttccacgccgcgcccatgcagaagcgggtggagccggcgtttttcgcctggcgcgctgattccagcacctgctcaacctccatcaggcgctcggcttcgaggccggttttgtagcgtgcgctctgcgggcaatatttacaatcttccgggcaggcgccggttttgatcgacagcagggtgctgacctgcacctggcgcggatcaaagtgttgacgatggatttgctgtgcttcgaatagcagatcgatcagcggtttattaaataattccgttacttgcgacattgtccagcgaggttggtgagccattttcccctccaaaaggtcgtacacttcctatttcacacagcctctttgttggcggcactcgcgcctcccagttacatagtgaactatgctcctggggatgttctcgcttgccgcctcgatgctgcgcgaaatattttgtgtacgtttcattgtaagtaagttcagtgtagacttgtaaacctaaatgttttcaaaatggtttacaagtcgcttatgacactggacgatctcgctttcgatcggcgccacatctggcacccctacacctctatgacttcccccctgccggtctacccggtggtgtccgcccacggttgcgagctgtccctcgccggcggcgaacagttggttgacggtatgtcttcctggtgggcggcgatccacggctacaatcacccacgcctcaatgcggcgctgaaggggcaaattgaccaaatgtcgcacgtgatgttcggcgggatcacccatccgccggcagttgcgctatgccgtcagctggtggcgatgaccccggcctcgctggagtgcgttttcctcgccgactccggttcagtggcggtagaggtggcgatgaaaatggcgctgcagtactggcaggctaaaggcgaaccacgtcgtcgttttctgaccttccgcaacggctatcacggggataccttcggagcgatgtcggtctgcgatccgcagaactcgatgcacagcctgtggcagggctacctgccggataacctgttcgcccccgcgccgcaaagccgctttgacggcgagtgggacgagatggatatggtgccgtttgcccgcctgatggccgcgcatcgtcatgaaatcgccgcggtgatcctcgaacctatcgtccagggggcgggcggcatgcggatgtaccatccggagtggctgaagcgggtgcgtaaaatgtgcgaccgggaagggatactgctgatcgccgatgagattgccaccggctttggacgcaccggcaagctgttcgcttgtgaacacgccgggattaccgccgacattctgtgtctgggcaaagcgctgaccggcggcaccatgaccctttccgccgccatcaccacccgaacggttgctgaaaccattagcaatggcgaagccggttgctttatgcacggccccacctttatgggcaatccgctggcctgcgcggtggccggcgaaagcctgcgcctgctggagagcggcgaatggcagccgcaggtggcggcgattgaagcccagctgcagggcgaactggccccggcgcggggatctgcgctggtcgcggacgtccgcgtgctgggcgctattggcgtggttgaaacccgtcgcccggtcaacatggccgccctgcagcgctttttcgtcgagcagggagtctggatccgtccgtttggccggctgatttatctgatgccgccgtacatcatcacgcccgagcagctgacccgcctgacccgtgcggtcaaccaggcagtgcaggacgaaacattttttagcgaataaatagcggaattgcgtcgtcgggaaggctacacttctttgttaatcagcgcattatcaatgaggatgaagcatgaaactgatcagtcacgatctccaggacggcggtaagctgcctaatcgtcacgtcttcaacggcatgggctacgatggcgacaatatttcgccgcatctgatgtgggatgatgtgcccgcgggaaccaaaagctttgtggtgacctgctacgatccggatgcgccgaccggctccggctggtggcactgggtggtcgctaacctgccggccgatacccgcgtcctgccgcaaggggccggttccggtcaggcggagctgccggaagaggccgttcagacccgcaccgattttggtaaggcaggctacggcggcgcggcgccgccgaagggcgaaacccaccgctatatcttcaccgtccacgccctggacgtcgagaaaattgaggtggatgctgaggccagcggcgcgatggtcggctttaacgtccatttccattccctcgccagcgcctccatcaccgccctgttcagttaatcttccccggatagcggcttgcgccttatccggggtacccgcggcgccatttgtttttcgggtggcgctgcgcttacccaacctacactacccccacgcccatgctagcgcagcgccgccgggcgattgccgcgggcacggagccgcttttatgccgggcggcggctgacgccttgcccggcctacggtccgtgccatttgtagccccggtaagcgcagcgccaccggggaaattggccttactgttcagtgactacctgcagcgccgttttacgcacccgcgcataccacaccaccgtcagcagcccgagccagaccaggccggcgatcagcgccatccgcgtttcggcaaacatccctagtacggcgatgaccagccccataaacagtagcgtcaacagcggcgcaaccggccagaacggaatgggaaaggcgatctggctgcgctcttcggcagacaaaccgcggcgcatggcaaaatgggatagcagaatcatcagccacacccataccgtggcgaatgccgccagcgaagcaattagcacaaatacctgctcggggatcagatagttcaataccaccgccgccagcagcgcgccgcccatgaccaccaccgtcatccagggcacaccgttgctggcgatgcgctggaagcttttcggcgccagcccctctttcgacatgccgtacatcatgcgtccggcgccaaaaatatcgctgttaatcgccgagatgctggcgctgatcacgatgatgttaaggatggtcgccgccgccgggatccccagaccgtcgaaaataagcacaaacggactcccctgttcgccaaagctgttccacgggaagatcgccatcagtaccgccagggtgcagacgtagaacaggataatgcgcagcggaatggtattgatggcctgcgggatcaccttcttaggctccttcgcttccgcggcggtgacgccgataatctccaccccgccgaaggcgaacatcacgatgccaagcgaggcgataacgccctgccagccgttaggggcaaagccgccgtggctccagaggttttccagcccggtggccgggaagctgtggccaaagccaaagaagatgatccccgcccccgccagcatcatggcgataatcgccaccaccttcaccagagacagccagaactccatctcgccaaatacccgcacgttgcacaggttcatcgcgccgataaagaaaatgatgctgaggatccagatccagcgcggcacatcggggtaccacaatcccatatagatgccgaaggcggtgacgtcggccagggcgacgatcaccatttcaaaggtgtaggtccagccggtaataaacccggccagtggcccgagatactggcgggcatagctgccgaaggagccggaaaccgggttgcgcaccgccatctcgcccagcgcgcgcatgacgataaacaccgccgcgccgccaatcagataggccagcagcaccgccgggcccgccgctttgatggctgaggccgagccatagaacagcccggtgccgatagcggagccgagcgcaataaaccgaatgtgtcgggcattgagcccgcgcagcagatgtggcttgtgttgttgttgcatatacaggtgtcctgatttttttatatgacgacaaatatgcggtgtagggcggtcgggggaatgacttcccccgacgcgggtacagagaacaacggtgattaatgcagtacggcaggcagcagacgcgtcaggtgacgggccgccagaagcgcaatggcgttatcgatatccggggcgaagtagcgatcctgcgtatagtgcggcacgcgttcgcgcagcaagtgacgcgcctcttccagcagcggactggtggtcagtccttcgcgcatatccagcccctgcgccgccgccagccactcaacggccagcaccccgcgggtgttctcggccatcgcccacaggcggcgaccggcagccggcgccatggaaacatggtcttcctggttcgcggaggtgggcaggctgtcaacgctatgcgggtgcgacagcgctttgttttcactggctaaggccgccgccgtgacctgggcaatcataaacccggagttgacgccgccatttttgacgaggaacggcggcagctgcgacatatggctgtccatcatcagcgcgatgcggcgctcggagagcgagccgatttcggcgatcgccagcgcgatattatccgcggccatcgccaccggttcggcatggaagttaccgccggagatgacgtcattttcggcggcaaagaccagcgggttatcggagaccgcgttggcttcagccagcagcacctcagccgcctggcggatctgcgtcaggcaggcgcccatcacctgcggctggcagcgcagggagtacgggtcctgcaccttgctgcagttatggtgcgactgcgagatcgcgctatcttcggtcagcaggtggcgatacagcgccgccgcatcaatctgcccgcgctggccgcgcacttcatggatgcgcgcatcaaacggacgacgtgagcccagcgccgcttcggtggttaacgccccgcagacgaccgcggaggcgaacagatcctcggcttcgaacagaccgcgcagggcaaaagcggtcgaggcctgggtgccgttgagtagcgccagcccctctttcgccgccagggtaatcggctccagccccacctgacgcagcgcttcggtggccggcagccattcgccgccgcgtacccgcgctttaccttctccgagcagggtcagcgacatatgcgccagcggcgcgaggtcgccggaagcgccgacggagcctttggccgggatccacggcgtcacgccggcattcaccaggccaatcagcgcctggatcacgctcaggcggatcccggagaaaccgcgggacaggctgttaatcttcagcaccataatcagccgcgccagatcatcgtccagcggctcgccaacgcccgccgcatgggacagcaccagcgaacgctgcaggttctccagatcttccgtcgagatacgggtttgcgccagcaggccaaaaccggtgttgatgccgtaggcggtacgcccttcggcaaggatggcgttgacgcaggccacgctctcgtcaatggcggcaaacgcgccgctgtcgagggtaatatttaccgggtggctgtaaacgtcgcggagctgcgacaggctgagttgacccgggatcaaagttaaagatttcatttagcgttcccctgcgttgccgccaccatcggaagattcagaccctgttctgctgcgcattcaatggcaatctcataccccgcgtcggcatgacgcatcacgccggtggccgggtcgttgtgcaggacgcgggcgatacgcgccgccgcttcatcggtaccatcgcagacgataaccatcccggagtgttgcgagaagcccatgcctaccccgccgccgtggtgcagcgacacccaggtcgcgccgctggcggtattgagcagggcgttgagcagcggccagtcggagaccgcatcagaaccatcgcgcatcgcttcggtttcgcggttcgggctggcgacggagccggagtcaaggtgatcccggccaatgacgatcggcgcggagacttcgccgctgcgcaccatttcgttaaacgccagaccgagcttttgccgccactccagaccgacccagcagatacgcgccggcagtccctggaagctgatgcgctcgcgcgccatatccagccagtggtgcagatgctgatcatctttgatgatctctttcactttcgcgtcggttttgtagatatcctgcggatcgccggacagcgctacccagcggaacgggccgataccgcggcagaacagcgggcggatataggccggcacgaagcccgggaaatcgaaggcgttgctgacgcccacttcctgcgccatctggcggatgttgttgccgtagtcgaaggttgggacccccatctcatggaaggccagcatcgcctgcacgtgagcggccatcgagcgtttcgccgccagaatagtgccctgcgggtcggattcggctttctgctgatactcttcccagctccagcctttcggcagatagccatgcagcgggtcgtgggcgctggtctggtcggtgaccatatccgggcgcacgccgcgcttcaccagctccggtacgatctccgcggcgttgccgcacagcgcgatagagatggcccgcccttcggcggtgtattttttgatgcgcgccagggcgtcatccagcgaggtcgcttgctcatccacgtagcgggtacgcagacggaaatcgatgcggctctgctgacattcgatgttcagcgagcaggcgccggccagcgtcgcggccagcggctgcgcgccgcccatgccgcccagaccggcggttaatacccagcggcctttcaggctgccctggtagtgctggcgaccggcttcgacgaaggtttcgtaggtaccctgcacgatgccctggctgccgatgtagatccagctgccggcggtcatctggccgtacatcgccagccctttggcatccagctcgttaaagtgttcccaggtggcccagtgcgggaccaggttggagttggcgatcagcacgcgcggtgagttttcatgggttttgaatacgcccaccggcttcccggactgcaccagcagggtttcatcgctctccaggttcttcagcgccttcacgatagcgtcatagcattcccagttgcgcgctgcgcgaccaataccgccatagaccaccagctcgtgcgggttttcggcgacatcgggatcaagattattcattaacatacgcagcggggcttcggtcagccagctcttcgcggtcagcgtcgtgcctcttggcgcacggacgtccagctggcgatatttgctttgcgacatcggggtttctcctgacaatgaacgttgtttacgtagatacatatacttgtctatacaagcatgcgcaagccaggatttaacagaaatgatacaattttgttatattgcgtcagcaatcacgttttgctgacgccagcgtggatcaggagccaaagcgcccctgcagacgatatcggctaccggggaacagcaggcgcgcgtgggagacgatgtgggttgtcgaccaggtgcgacgacggatcagcaggcacggatcgtgggcgtgaatatgcagcagcgcgcactcttccgccgtggcctgcaccgcttcaacaatatgttcaccttcggttaacggcgcgatcagcgacaggtaatcatggggcgtggtggcggtgtagtcctgatgcagatagtccgggaccactgcggcattgacgcagcgatcttcgatttgcaccggcacctcgttttcgtaatgcaccatcagcgagtgaaagatgcgggtgccttccgggacgctgagcgccgtcgcctgaatatgatccgcccgggtctcctcaagcaggagtacctcacagcggtgctgatggtgacgggcggcaatttctgcggcaatactgcgcacctcgaacagcgccgactgccctttcggctcggcgacaaaggttcccaccccttgcaacctgaccagcaggccttcgtccgtcagctcgcgcagcgcgcgattgatggtcatccggctgaagccgaactgggccaccagctcagcttccgacgggatacggtcatgcggtcgccagacgccgctgtggatcttttcgctgatcgcctgcttcaccttttcatagaaaggcgcgggcgcggaacgaggttgttgtgcaaacatggcctggctttccttatgcgtaataagcggagcggcgaaacgaaaataatagcgcggatcgctagcgccaccaatgggcgatttgccatgccacacgggccgccgcgcgagcgccctgaccgtcaatgtcaaacagcgggttaaactccaccagatccaccgcctgcagcttaccgctgcggcacagcggctcaacgatgcgcagcagcgtgcccagcggcacgcccagcgccgccggggccgacaccgccggcatttctcgcgccggcagcacgtcgagatcgatagtcagatacagacggtcgaattgcgcgatattgcgctcaagctccggcaacacgcgagtttcgaaggctgtcagcacctccagatcttcaatgatagccacctggcggcgcgccgcttcatcccatagcgcctgggtgttcgccgcccggctaaccccgatgcaggtatagtgaaaaccgcgctgctgcgcgtcacactccagcgccaactggcggaacggcgtcccggagctggcgcattcggcaaagcgcagatccagatgcgcatcgagattaataatgcccactttttcgcccgggaaggcgtccagtaccccagcgccgtggccgaaggccgtctcgtggccgccgcccaggaccagcgtgcgtttacccgcccgctgacagtcggccaccgcctcgcgcagcgcctgatgcgcggcttctaactgctcgccgtcgacgctgatggtgcccatatccacgcagcggtcatgaccctgatggctggccatattggccaacgcccggcgcagggtcgccgggccgtccgctgccccggtacgccccttgttacgccgaaccccttcgtcacaggcgaagccgagcagcgcgatatcgccgggcatctcctgcggcgcgaagcgttccgcgcgggcgatggtctggaacaggcgcagcgcattggacgcttccgcgctgtcgtcgcgaccttgccaaaggttagcgggggtagcttgccacagcatcattgcagttctcctcgtaccacacgctgccagagcggactgcgccccggctcatacaccatctcgacgggatgctcagcatcccagatggcgaagttcgccacaaagcccggcgccagctggccgtggctggcctggcgccccagcgcccgcgcggcatggcgcgtcacgccggcccacgcctcctccggcgtcaggccaaacttaacgcaggccatgttcatcgccagatgcaggctggcgaaggggctggtgccggggttgaaatcggtcgccaccgccatcggcacctggtacttgcgcagcagctcgaccggcggtttacgggtttcattaaggaagtagaacgcgccggggagcagggctgccacggtgccgctttcgcgcatcgccgccacgccctcttccgtcagatactcgatatggtcggcggaaagcccatgatagcggctcaccagctgcgcgccgcccagcgacgagagctgctcaacgtggccttttaccggaatgcccagcgcctgcgccgcctgaaagacgcgctcagtttgctgcgggctgaagccgacgttttcgcagaagacgtcaacgctttcaaacagtccctcctgccacagcgtcggcaaaatggtctcgcagaccagcgtaatatagccgtcagcatcgccttgatattccggcggcgtggcgtgggcggagagcagcgtcgccgacagttccacgccattatgatcggccagttgtcgggcgacccgcagcattttgcgttcgtttggcaggtcgaggccgtagccggatttgatctccagggtggtcaccccttcacgcagcaggcgttccagacgcggctgggccagcgccagtagttcagcttcgctgctgtcgcgcgtggcgcgcacggtggagttaatgccgccgccgctggcgctgatggtttgatacgacacgccgttcagccgctgctcccactcctgggcccggctgccgccgaagacgagatgggtgtggcagtcgattaatcccggcgttaccaaccggccttcaagatcgatactgcgcccgctggggacgtcatcttcggcgacaatcgccgcgatgcggccgtcgcgcaccagcagcgcatggcgctccagcaggccgtaaggttgagcgtgatcggggttcagggtggcgagacgcccgtttcgccagataacgagttcggaagtggcttcagtcatagcgcttaacttgtcatgggttgtatagacatttattttcataacgccggtaaagtcaacaatagcgcagggaaatgttatttttttgtgactaaagaccatccggcagagctgcgcgttgcgtaaagacggtaagtttttccgtccacgtcttcccgtttcgttcaagttagtataaaacagcaggttttaaaggacttataccctggcgtctcagccggggtatttcactacgcttaattttgcccggagcaacatgaacacatattccgtttcccgtctggcgctggcgctggccttcggcgtgacgctgtccgcctgtagctcgacgcctgccgatcaacagccctcaacgcagactgcaccgggcactaccgcgcgtcccatactcaacgccgaagaagcgaaaaacttcacgccggcggcctatttccagtcgctggctcccaacgccgccgcctggacgccgtctgccatcagcctgccggcgcagcctgactttatcgtcggccctgcgggaacccagggcgtaacccataccaccattcaggcggcggtggatgcggcaattgcccgtcactctaaccgtcgtctgtatatcgcgattatgccgggcgagtaccctggaaccgtctacgttccggcggcgccgggcgccctgaccctgtatggtactggcgataagccaatcgacgtgaaaatcagcgaagccattgattccgagatggatcgcaacacctggcgtcgtctggtcaatccaggcggtaaatatatgccgggtaaaccggcgtggtatatgttcgacagttgccaaagcaaatccgcggcgaccgtcggcgtaatgtgttccgcagtcttctggtcacagaataatggtctgcagctgcagaacctgaccatcgccaacaacctcggcgacagcgttgacgccggtacccaccaggcggtggcattgcgcagcgatggcgaccaggtgcagatcaataaggtcaatattcttggccgtcagaacaccttcttcgtgaccaacagcggcgtgcaaaaccgtctgcaggacaaccgtcagacccgcaccctggtgaccaacagctacattgaaggcgatgtggatatcgtttccggccgcggcgcggtggtgtttgataacaccgatttccgcgtggtgaattcccgtacccagaaagaggcctacgtcttcgcgccggctactctgaagagcgtgacctacggcttcctggcgaccaacagccgcttcaccgcctccggggataacgtcgcgcagctcggccgcgcgctggatgtcgatggcaacagcaacggccaggtggtgatccgcgacagcgctatcaatgaaggctttaatattgcccagccgtgggcggcggcggtaggctccggccgcccgttcagcggcaacaccggcagcgccgatgacaaaggcaatctgcagcgcaacctcaacgacaacggcttcaaccgcatgtgggagtacaataaccgcggcgtgggaagcaccgtggtcgccgagccgaaacagtaaagcgcaacaagcgtgaaccataataaaagagagggcgatgccctctctcaaactgctgacaatgtgcaatcttcaggaattgcccggcggcgctgctggactgaccccataaagttggatggttcatattaagcggctctcagagcctgggttcgggactctaccggactcaggccttttaatttcaggcttatccgctcgttgttgtagtaatagatatagtcctctacggcttttcttagcgcactgacactcctgaactccctcagataaaaacactccgatttcagggtcccgaagaagttttccatcactgcattatccaggcagtttcctttacgcgacatactctgcgtcatcccatgcgcctttaaacgttcctgatagctcctcatcctgtaatgccagccctgatccgagtgcagcagcggagcatctcccggtctgagcttcgggaacgcaccgtccagcatcgtattcaccatctccatcaccggcctttccgacaggctgtaggcgataacctcccggttaaacagatcgagaactgacgacaggtaaagcttttttccctgtaccgggaactctgtcacatctgttacccatttttcgttggcttttgacgcaccgaaattccggctcaggatattgggcgcggcctcgcccgttctccctttccaggcacgatattttttcgcccttatcacagaccggagtgacagttctgccatcagccgctgcactgttttatggtttatccgcagcccctgttttctcagtgcgagcgtgatcctgcggtagccataacgacctttgtgatagtggtatatcttcctgatgttctctttaagacccgcatacctgtccccttgcttcagtgcattcatattgtaataccacgtgctacgggacataccggccgcccgcagaaggtcccgcagagcgtgttcatgccttagttcactgattatcagggctttttgccatttttttcgctctgaaccaaggctttcaacttttttagataggcattctctgcccgcagataacgcagttcggccctgagttcttcgggggagagtttttccagctctttatctgtcagtggtgggatattttttggctttgtcatttgtccgggccgtccgcattgcatgtttaaaagaccttccgctccggcatcgttgtacacgtcgagccagcgccggacaagtatttctgcggagagattaaaccgggcagccgcttcacgcatcgtcaggcggtcactgataaccgcccggacgaccacgagtttaaattcatcggaataatgattattttttgcagtcaggccttctgcaccgtggaactgccatgccctgacccagcgacggacagatgttctttcaataccaaaaaggtcggctgtactctgttctccgtctttaccggacaaataatgattaaccacagccagttttgtttcaggggaatactttggtttagccataaaattgcaccttactcagttgggtgtccaacttttggggtgcagtccatgcgcttgcgcgggcctacagataactgcataacggtttgatattgaagtctttcgtaggccgggtaaggcgaaagccgccacccggcagaaatgcgagcacaatgacgaaacaggtttgtcgtcagccagagagggggcatgccccctcttttctttttcgttcagcgcttcacgccgtcaggcggaacgccatttgcgggtcagtggtttttccagttccacgatcaggaacatggcgaagccgatgataaaggtgatcacccagtagcggaacggcagcccggtggtgccgaacagcatctgcataaaaggcgcgtagataatcagcagctgtagcaccagcagtacgccgctgacgatccagatccctttgttggccagcagacctttggttaacgagaatccatccgatacgcggcagttcagcatatagaaccactgggcggtgaccagagtctgcaacagcacggtacggataaactccggcgaatagccgcgcggctgcagccaggcttcgagaataaaggcgctgaccgcaatcattgaccctacaaacgctacgcgccagatggcaaagccgtccatcacgtgaaggctgtatgacagcggtgacctttttcaccatctataacacctgggatcgctttgattatgactatcactggatcctcgggctgctgacctttatctcgaccatcgcgacgccgctgttttttgtcgtggccggctatcttgatgcgcagacgcgccacgatgccaactggcaaattggtaaaattaaaagcgtggtcatcgtctttctgttttgggtgacggtctattatgtctgggagccttaccagcgcggctacctgatccagccctggtttattttcgccctgattgtcatctatacctttcatcctttgatcgcctggctcagccagcggcgcgggctctttttcgccgtgctcctgacgctgctgtgctgctcctacggttacgacctgctctcggtgatctacccggacagacatcttttcagtttgccgccgcagtatcgcctgtggacatggctactgttttatttaaccgggcagttgtttaacgatccaaaggtcgcggagtggatacgcaacccacaggtgattaaagggtcgattatcgccctgccctttgtctatttatttacctggttttatgaacgccatttcttcttcgccctgtttaaagcagatcgtaatgcgttcattctcacgggatcgcaaatttatatcctgatcgtcctgctggtgatcgccgctaacgccgtgcagtttaaaaagaaccgcgagtggaaagaggccgtgctggcgacggtcagtaaagcgatgaccggagtttatatcctccactattccgtgtttcacctgctggtgatgctcatccctgtgcattcgctagccaccaagttgggggtaatagcgctgacctttgtcctgtcggtgctcatttcccttgccgcgctctccagtacgctgctaaggaaggtgattaccttgtaaccgacaacgggacgatttagcggaagctcaactggatactgatcacaaacacgctgggaataataatgccgctttcaacggcgaaataatcggtgaagttatactggatagcgtggtagatatagggtgaaaagccgatccccgtggcgtccttaaagtctttataggagccatgatcgccgcaatgctcgaaggcgtcgaagaagaattcgccggtatagccgtaaacgcctttgaaggtccacccgctgccgctgtggtaccagtctcttctcacccccagcgccaggcagcgatcgttgaagctgttattcatagtgccaagcagaaggctgtatttggagtctgcagagaatttccgctccactgagaaaaaatgattttcgaaattctctgtatattgtccgtgattattggtcagatggtaaacataggaaccggtattcaccgaatagaggttaagttcgttcgcctgcgcgagagaggctaacccggccaggagcatcacgcttttgccgcgcattttccctcctcagtcctcaaggcctgtccagggacagaaagcttttgccgtatttaccggtcgtgacaggggtataagactcgacagggaaatgggggaaaaataacgatgccaaaccgccgcgtcgttaccaaaaagcgtagcacagcccttattcgccaacaaatcgaatgggccgtttacgacatggcagacgttacccctttaccttactgtgcaaaaagcagacaaagcctcatcatattttccgctatgctcagactccgacgcggaagaaagccacctgtcgacgacagcgttgctgtttaccccttcgcgcgtcggcgcaatttcatgcatttcgccagccatgacagaattttcacaattggctttcttctaccatcatcagcttcttcccgctggttttacagcgaaatcctgcacaacccgacttttctgtacaagttatcactcaataaaatcattataaatcaacaaattaaaacacaaacaaaaaataaaccgttacgttgtacatatagcaatgaaaaaagttgtacatagtgaaatcagcgtctatagttttggagtgttaactgcttgttgcgcaacaaagcggggaagcttgacgattgcgcagcgagtcggacggtggttcctggttatacatttcctgttcgtgacttggcgcgtaccaacggtacgctgcgacttttattgtctgtttgctttatacgtgggagagttcgagctatgcatattaaaaataccattccagcagagtttgtcttcaattcggccctgatgaagaatattgagaatacgctcattaagcagcacagaacggtaaataatgagcggatgattacggaaatccagcatcgtctgcaaacggaaagtaacgaaatactttccgatctctatctgcaggcgctggatatgctgtacagcaaacctcatcattaaataaacccactgtgctggcagcaggcttcgacctgctgtaccggcgcgcctgggtctctatcggctaactgaggcaaaaaaatgtcacaccataatacttgctatcgttctgagcattacgatctgtggtttgataatggttttcttctctatgggatgtcgctgatcctgaatagcctgccggcatcttacttccgcaaaaaacatgttttcttcaccagcgacaattatttcgcggtactgcagcacaactataatcggcgggatacattatttattctgttaaccgaaggcaacgatcttaattttcttagtgaactgcctatgctgcgcttaccggccaactcgacgccggaagagttaaagatatttctgcatcaacccacccgctattacaaaacccatccggcgccaggcgcctcggtgcagtttaccgagcgggaaaagaaagttattcaacttatcagcaatggcgaagcggtcgccagcattggccggtcgctaaacctgcatataaaaaccatttatcagatccggctgaatctgattaaaaagctcggctgcagcggtagaaccgatttttttaatatcagccgcagcgaaacgttcaaatcctggagccagattcacctgtaaccaagcactcaagccctgatccgcaccacggatcggggcgcttaattttggccgtgaaaatggatgctgaagccctgctcctgccagtggctgagcagctcctcctgcagaggcgtggcggcacgtccggtccagacgaaaatatgctgcccgggaaatagctcaggccgcggcgactccagcggttcggcgagaacgttgacatgccagccgcgttgggaaagacgccatgcctccagccacagacgcgtcctgtcctcattgctccagcccaccagcagcgtctctttgccattttttttacgcgcttcggcgagaaacaacgctacgcagtcaattaacaggccgtccagcatgctgctaatcaccagcgaggtattctgatccagcttgagacgctgtcgtaccggcactaacaggctatcgatgagggtgtcgacggggtgttgatgactcagcgccattaatttggcgcggattctggcgggctgcatataacgcagaatggacatcatctcttcctgaagatgcgcggattcgtcgcgcgccgccggcaggttatcctccagcagcgctttgactttccctactgatacaccgcgctctatccagcgcttgatctcttcgatacgcaggatatcttcttcatcaaattgtcgatgcccgccttcgctacgctgcggtttcagtagaccgtaacgacgctgccaggcgcgcagtgtgaccggattgattccgcaacgttcggcgacttcaccgatactgtaaaacgccatagcagcctcacatcaacctgataccttaatacctaaactaacgaattcaggcatcctgtacaactctattttcttgtacagataaagatatcaggttgcggctcacagcgcccgggaaaaaagatgaaaaaatgtttagctgatttcgcggtggttcattttttctccggccatgcgacggcgggtaggccccccaggcgcgcgctggcgaacaaattgccctgaaactgtgaaataccggctgattccagccacatccactcttcagcacgctcaacgccgacggctgagaccgcaatctccagagaagtacagcatttgataatcgcctgtacaatcgactggcgcggtccgtcctggtggatattgcggatcagctcatggtcgattttaattctgtcgggttggtattgcgccagcagcgatagcccggcaaacccggcgccgaagtgatcgatggcaagattaattcccgcgcccttcagtttgcgcaccgcatcggtaaaatcgtccatccgcgaaatcacttcccgctcagtgaactcgacaataatctgctccggaataaggtcattgcgactaatttcgtcgagcaggaaagccaccgcattcggcgctttgaccatggtcatcggcagtaaattaatgcttaacgccttattacgtaaacctaattttcccgccagcgacaacgccacccgtttactgtgcaggtcggcgagataaatatcgtccccggtcagcccggcaaaataggcgccgggggattgcccgtccggtgtacgcaacagcgcttcccacgaaataatttcgcaggcgaaagggtcgacaatcggctggaaggcaaaggaacaaccttccgtattatcgataatcggggtatcaggatagaacgtctccttatcaggaataaaaacccaactatctgcggaaggaatctcaaaatagttcgctttttctgtggcttcgacaaaagtacggaaaaattgcagcgcccggtcatcataggtgagctgatattttgacgtcccccggtccatcaccgcctgcagaacttcctcgcgatcgtgttcgcgtaaatcaaacagttccatcccgaccttaccaaaacgacgggacggcgcataatcgcaaagcaactccaccagattatagtggcgaggatcccggcagatatgctgataaatatcctgaaccttttcttcaggcccctcaatgagttgaaaaaaatgcgtcccgttaaaaagtaaaataccggtgacgtccgcctgcccatttctttcgtttgccctggcgaccatggcctcgatcgatttgaatgagacattgtcgcagatatggctgcgataaatgatggtggttagcatagtgattccagatgggagggataagcattcacagtagcagttatcaggctaagggtctcgtaaaactacgttttgtcttaacaaaaaagatacactaaaaatcccttttttgtgcaaggttttccctttttttctttccttgtacaacatgcaacgctaaaccccacctttacaagccagaaccgcgccaggcaaaaaaaattaaacaattaaaaatcatatagttaaactaacatgaatcattattgtgcaactttgtgtgtacaggttaataattattgtataagtttaatggcagttaacagatgaatgaaatgaaaggagcacatatgcagcagaatggttacattccagatacagcgaacgcaattgcccagtatttcaacaaagcatctttgccttcccagcaggaaaccctgggtcagatcgtgatggatattcttaacgaagggcgtcatctcaaccgcaaagcgctatgcaccaaactgttgagccgcctggaccgcgctcgcgcgccggaggaagagagccactatcagaccttaattggtctgctgtttgctggccaggaataacgtcatcgatcgtcgcctgttgcagcgccgcagtagcagatgaggggcgatcgcttccacaaacctgctgctgacctgaatgcccgttcgcctattcaggaaaagggtggcatgcatagagacggttatgaataacagtgaaactgaggaaataaccgatgaaatcatcggcgaggcggttctagcgcttctgaaaacgaatcgcccgattaccaccccgaccctgctggttcgacttcggttaatgcaggcgacagaaccagatcgccagcgtagaaagatcatcgctgccgtgatcgaagaaatttgcgcgaagcttatccgtcagcggaagtacgcgcctttacaggtaaagaaaatcaatggccgttgggaaaccagaggttcgctggcgccagacagcatgccgtcggaagctaaaaagatccactgattatcccaaccatggtgaattaaacagagtgagaatgtgatgagacagactatgcatcagcaaccagatatttacgcaagactgcaggacaccgcgctctccgactatttccgtaacgccggtgataaactggttgatgagtccgccgtcatgtcgctcgccatcaacagtattctccagtccgagggtcacctgaacaataaggccattattttatggctgattcaggcgctggaaaccaccgatgacgtggtgaccgcggacgtgatccgaaaaacgttggagattgtcgttggctacaccatggacgatatctaacgtcgtcacgcttctggcccgccaggacaacgccttctccgcagagcctgtccgctctgagcaaaaaaaacctcgctaaggcgaggttttttcttttacctgatggcggttcagtgggcgttgaccaccacccacatcggcccctgcccaaccgcatagcggcctttctcctgcagcagtccctgctcaccgacgatatcgtacaccgcgatatggtgcgacttctgcccggcggcaatgagatatttaccgctgtgatcgaggttaaagccgcgcggctgggtctcggtaggctgatagccttccaccgccagcacgctaccatcttccgaaacgctgaataccgtgatgatgctggcggtacgatcgcaggcgtaaagatgacggccatccggggtgatatgaatatccgccgcccagcgcacgccgctaaaatcaggcggcatcatatccagggtctgtacacattcgatgttgcccttaggatctttcagctcccagacgtcaatcgagctgtttagctcattgacgcagtaaccatactgctggttgggatggaataccatgtgacgcggaccggcgccctcgacggtcgtcacttccgcgggctcctgtgccgaaaggaaaccatcgtcgctgagggtaaacaggcaaatgcgatcctgcttcagcgccggcacccacagggtgcgattatccggggagatattggccgagtggcagccttccagcccttccaccacggtgatggtttcgcccggcaggccgtcgtgcagcggggtcacgctgacacagccctgattgtaggaggcgctgaagacaaagcggccatgacgatcggtagagatatgggtcgggctgcccggcagcgcagcttcgcccgcaaaggttaacgccccgttatccggcgtgatgcgataggccagcacgcgaaactccggacgaacgccaacgtacagaaattccttgttggggctgaccaccatcggctggacctgccctggggcatcaaccacctgcaccagcgtcagtttgccgtccgcttcaagactccagacatggatttgttggctttccgggctggcggtataaacggtttgtttcatgactactccttccctcactgcacgtggaattttcattttcaggataacagcaccctgaaaattataagacatccgcccatgatactcgcatcgtccgccgaatttccgccggacggcggcacaaagggcatacagacattcacgacagatgtggaaaaattggtcctgacgccacggcggtgtaccatcatggccaggtcacttttcaacatcaaccggaaataacacatgacaacacgcgtgattgccctggatttagacggcaccctgcttaccagcaaaaaaaccattctgcccgcttcgctggaggcgctggcccgcgccagagaggcaggctatcaggtcatcgtcgtcaccggacgtcatcacgtcgctatccatcctttttatcaggcactggctctcgatacacctgcaatttgttgtaatggcacctatttgtatgattatcacgcaaaaaaggttttggccgccgatcctatgccggtagagcaagcggtaagcctcactgccatgctcgccaaacagcagatccacggcctggcatatgtggacgacgcgatgctttatgaacaccccaccgggcatgtgatccgcacccgcaactgggcgcaggcgttaccggaagatcagcgtccggttttcgctcaggtcgattcgctggcgcaggcggttcgcgaagttaacgcggtatggaaattcgctctcaccgatgacgacattccccgcctgcagcggtttgcgcagcaggttggcgagacgctgggcctcgagtgcgaatggtcgtggcacgatcaggtagatatcgcgcgcgccggcaacagcaaaggcaaacgcctggcgcaatgggtggccgaccaggggctgtcgatgcaggatgtggtggccttcggcgataactacaacgatcttagcatgctggaagcggcgggcaccggggtggcgatgggcaacgcggtggacgaggtgaaagcccgcgccaacatagtcatcggcgacaatgagtccaccagcatcgccgagtttatctaccgccaactgctgtaatcaggcggcgatcgacacgcttttgatctgggcaaacacctgctgacctggcgctatcgccaggtcgtcccgcgcccatgggctaatcctggcccatagcagacggccactcactctgagctgcacttcaatctgtccgttgacctccagacactgagccacctcggcgcgcaagatattgcggatgctggtcccggacggctgggccagtgtcagcgaaacgtccgacgcctgaatgcggatccgtgcggtgtcgcctgcgggacgttcgagccggttgacccacagcaactggtcccccagcgccagggccgtcatcgcatactgcgggtgctgcgcggcgacggtggcgctaaggatcgtactctgctgctccgccggcagccaggggtgcatcacgctgctgctccagacctcctccagcggaccgaaagctttcaccttaccggcctccagcaccagcacgcgatcggccagatgctggatctcatccagcgagtggctgacgtagagcatcggaatatgaatctcctgcgccagccgctgcaggtagggcaatagctcgcgtttgcgcggaatgtccagcgaggccagcggctcatccagcagcagtagctctggcgcggtcagcagggcgcggccgatggccactcgctgcttttcgccgccggataaccggcccggcagacgatccagcaagggcgcaatccccagcagatccaccagcttatcgaactggctgaccatggatttcgccatcccatactgcagattgccgcgcactttataatggggaaacaggcgcgcatcctgaaagacatagccgatacggcgctgctccggcgccaggcagatacgctgcgcggtgtcgttcagcacccggccattgagcacgatccgccccgcctggggtcgggtcaggccgctgatggcgttaataaacgaggttttgccagcgccggagacgccaaagacggcggtgatcccgctggcgggcagagtttcacggatctgcaggcagtggctaccgagggtctgggtaaagtccagctccagcatcattatcctcccatgcgctggcggctcacgcgggccagccattccgaaatcagcagcgaaaccagcgccagaccgatggcgatgaggcagaggcgggccgccaccccctccccgcccggggtttgaatcaaggtgtacatcgccgaagggagggtgcgcgtttcaccgggaatattggagacgaacgtgatggtcgcgccaaactcccctaacgagcgggcgaaggccagcaccgtgccgacaataatccccggcagagtcaacggcaacgtaatggtcaaaaatacccgccagcggctggccccgagggttctcgccgcttgctccagtttgacgtccaccccttccagcgccaggcgaatggcgcgcaccatcagcgggaaagacatcaccgccgccgccagcaccgccccgcgccagctaaaagcaaagctgatgccgaaccagtcatacagccagctgccaataaacccgcgccgccccatggccaccagcagcaggtaccccaccaccaccggaggcagcaccagcggcagatggagaatactgtcgagcagtgccttgccgggaaaggtgcgccggaccagcagccaggaaaaaaagatgccaaagggcaggctcaaggccaccgccagggaggagactttcaggctcagcagcaccgcctgccattcgggttcgctcagaaacatcagcgggtggtaaatccgtaacgtttaaagatagcggacgcttccggccctttcaggtagtcatagaaggcgctcacggccgcattgcggtgcccatcgacaatcgccagcgggtactcgactttctgatgcgaggcttccgggaaggtgccgaccactttcacccccttgctggccacggcatcggagccatagacaatccccagcggcgcttcgttgcgctccaccagcgccagcgcaccgcgcacgtcttcagccggggcgagcttcggcgacaacgtctcccaggcaccgagtttctgcagtgcttctttggcatagataccggccgggacatgctgtggatcgcccaccgccagacggcctcctttcagcaggctggtccagtcggttttctcatcaatggttatcgccccctgcgcactggctttcggcgcgaccaccaccaggctgttgccaagcagagtggcgcgggttgccggatcgatggcctttttatctgccgcgtaatccatccatttctgatcggcggagataaacaggtccgctggcgcacccgcttctatctgccgcgccagcgtcgacgacgaggcaaacgacgacacgacctcgacgtttttttctttcttgtacgcctgggcaatatcctgcatcgcgttggttaacgatgcggcggcgaaaacggtcactttaccctctgccgccagcgcctgacccgcgacgcacagcgtgagtgataccccgacaaccccgcgtaaccaagaacctgccatcttactctcctgtcaatgcgttatgtagtcgataatataacgatatgcgaagcgtttttatagtgacacaggacaataaaacgaagggaaatgatacaggagggaaatagcacagcgcccggttaaaccgggcgccgggaaatcagtgattttgctggctgcgatctttgtggcctacgccggagaagaggttgaacacttcgccaagaccgtaaatcagtcccaggatgaccgccatcaccaccggtaccatgatgaccgcaaaaaccagacttttcaaaagctctaacatggttcactccagatagtatgatttcctgattgtaacgatttcagccgaaaaaacacgtcccatttgtgcggtgggtaatgaccaaccgcgcagagaggttttgcaagtgggcgactatcggtcacaatacccttttttgtcaggaaacgattatgcaggccgaaattcttctcacccttaagctacagcagcgcctgtttgccgatccgcggcggatcgccctgctcaaacagattgaccagaccggttcgataagccagggggcgaagcatgcgggtatcagctataagagcgcttgggatgccatcaatgagatgaaccagctcagcgaacaaccgctggtggatcgcgccaccggcggaaagggcggcggcggcgcggtgctgacccgctacgggcagcgtctgatccagctgtacgatctgctggcgcagatccagcagaaagcgtttgatgtactcagcgatgacgatgccctgccgctggatagcctgctggcggccatctcgcgcttttccctgcagaccagcgcccgcaaccagtggttcggcaccattaccggccgcgatcgccagcaggtgcagcagcacgtggaagtactgttggctgacggaaaaacccgcctgaacgtcgccatcaccgcgcaaagcgctgagaagctgggactcgatgagggccaggaggtgctggtcctgctcaaagcgccatgggtcggcatcaccctcgatcccgcagcagcccgccaggccgataaccagctgtcgggacgtatcagtcatatcgaatgcgggtccggacagtgcgaagtactgatgaccctggcggacggtcaaaccctgtgcgccaccctgccacaggcgcaggccgctggcctggcggaaggaacggaggcgatcgcttacttcaatgccgatcgcatcattctcgcgacgttatgctgaccccattgacattacgcgcctgaagtcgtatccctgatgcacatcgctgcaaaaaatgggatacatcatgtcatcattgcaaatttcgcaaggcacgtttcgcctgagcgatacaaagaccttaaaaatagaccacctgagcgtggcggcgggtgaaagctgggcgttcgtcggcagcaacggcagcggcaaatccgccctcgcgcgggccctggcaggcgacctgaccctgctcagcggccagcgcgaaagccacttctcccgcgtgacccgcctctccttcgaacagttgcagaagctggtcagcgacgagtggcagcgcaataacaccgacctgctcagcccaggcgaagaagacaccggccgcaccaccgcggagattatccaggatgaggtgaaagatcctgcccgctgcgcgcgcctggccgaacagtttggcatcagcgccctgctggaccgccggtttaaatacctgtcgaccggggaaacgcgtaagaccctgctgtgtcaggccctgatgaccgatccgcaactgctgatcctcgatgaacctttcgacggtctcgacgtcaactcccgccagcagcttgctgccctgctggccgacctgcacagcgccggcatcaccctggtgctggtgctcaaccgtttcgatgagatcccggagtttgtgcaattcgccggcgtgctggctgactgcaccctcagcgagaccggcgagaagtcttccctgctgcagcaggcgctggtcgcccagctggcgcacagtgaaaaactggacggcatcaccctgccggagccggatgtcccaccggcccgtcatgcgctggcagactcggcgccgcgtatcgtgctcaacgacggcgtggtctcctataacgatcgcccggtcatcaatcacctctcatggaccgtgaatccaggcgaacactggcagatcgtcggtcccaacggcgccggtaaatctacgctgctgagcctggtcaccggggatcatccgcagggctacagcaacgatctcacgctctttggccgccggcgcggcagcggtgagaccatctgggatattaaaaagcatatcggctacgtcagcagcagcctgcatctggactaccgggtcagcaccaacgtccgcaacgtcatcctgtcgggctattttgactcgatcggcatttatcaggctgtctccgacaagcagcataagctggtgcagcaatggctggatattctcggcatcgataagcgcaccgccgacgcgccgtttcacagtctgtcgtggggccagcagcggctggcgcttatcgtccgcgcgctggtgaagcatccaaccctgctgatcctcgatgaaccgctgcaggggctggaccccctcaaccgccagctggtgcgccgctttgtcgacgtgttgattggcgaaggggccacacagctgctgtttgtctcgcaccatgcggaagatgccccggactgtattacccatcgcctggcgttcgttcccagtggagacggttacacttatcagctcggccctgtggcctgacgccccctgccggggatcgaaagatccctggtatttttcagaaaaatagcgccaaacaaacctaatacattgaattaaaattaaaaatataaaatttacgttatttacaccccaagtgtaaacgattccactaacttgccctatgtcacacttttcacttctttgatatgctatcttcctcacaaacgataagccgaatggagcgaatcatgaaagttctggttacaggtggtagcggttacattggaagtcatacctgcgttcaactgctgcagcagggacacgaggtggtgatcctcgacaatctctgcaacagcaagcgcagcgtactgccggtgattgaacgtctcggcggcaaagaagccacctttattgaaggcgatattcgtaacgaagcgctgatgacggagatcctccacgatcacgccattgaggcagtgatccacttcgccgggctgaaagccgtcggggagtccgtcgccaagccgctggaatattacgacaataacgtcaccggcacactgaaattagtctctgccatgcgcgccgctggcgtgaagaactttatctttagctcctccgctaccgtctacggcgatcagccgaaaatcccgtatgtcgaaagcttcccgaccggcaccccgcaaagcccttacggcaaaagcaagctgatggtagagcagatcctgaccgacctgcagaaagcccagccggagtggagcattgccctgctgcgctacttcaacccggtcggcgcccacccgtcgggcgacatgggggaagacccgcaggggatcccgaacaacctgatgccctacatcgcccaggtcgccgttggccgtcgcgaatcgctggccatttttggtaacgactatccgaccgaagatggtaccggcgtgcgcgattacatccatgtgatggacctcgccgatggccacgtcgcggccatggaaaaactggctgacaaagccggggtgcatatctacaaccttggcgccggcgtcggcagcagcgtgctcgacgtagtcaatgctttcagcaaggcctgcggcaaacccattaactaccatttcgcgccgcgccgcgatggcgacctcccggcctactgggcggatgctgccaaggccgaccgcgagctgaactggcgcgtaacgcgcaacctggacgaaatggcgcaggacacctggcactggcagtcccgtcatccgcagggttatccagactaaggaaccttcatgagcgtatttaaccccgttgaccatccacatcgtcgttataacccgttaaccggacagtggattctggtttctccgcatcgcgccaagcgcccctggcagggggcgcaggaaacgccggcaaaacagaccttgccggcccacgatccggactgtttcctgtgcccgggcaacacccgggtgaccggcgacaccaacccgaattacaccggtacctacgtatttaccaacgactttgcggccctgatgaccgacaccccggacgcaccggagagtgacgatccgctgatgcgctgccagagcgcccgcggcaccagtcgggtgatctgcttctcgccagaccacagcaaaacgctgccggaactgagccttggagcgctggaagacgtggttaaaacgtggcaggaacagaccgcggacctcgggaaaagctacccgtgggtgcaggtttttgaaaacaaaggggcagcgatgggctgctccaaccctcacccgcatggtcaggtgtgggccaacagtttcctgcccaatgaagcggaacgggaagaccgtctgcagaaagagtattacgccgcacagggccagccgatgctgctggactatgtgcagcgcgaactggccgacggcagccgcacggtggtggacaccgagcactggctggcggtggtgccctactgggccgcctggccgttcgaaacgctgctgttgccgaaagcgcacgtgcagcgcataaccgatctcaccgacgcccagcgcagcgatctggcgctggcgttgaaaaagctgaccagccgttacgacaacctgttccagtgctcattcccctactccatgggctggcacggcgcgccgtttaacgacgaagaccataaccactggcagcttcatgcccacttttatccgccgctgctgcgctccgcgacggtccgcaagtttatggttggttatgagatgctggccgaaactcagcgcgatctgaccgccgagcaagctgccgaacgactgcgcgccgtcagcgacgtccattttcgtgaatccggagtgtaatgatgagtctgaaagagaaaacccaaaccctgttcgctgacgccttcggctacccggccagccatgtcattcaagcgccaggccgcgtcaacctgatcggcgagcataccgattacaacgacggttttgtgctcccctgcgctatcgactaccagacggtgatcagctgtgcgccgcgcgacgatcgtacggtgcgggtgattgccgctgattacgacaatcagaccgatgagttctctctcgacgcgccgattatcagccacgacacccagcagtggtcgaactatgtccgcggcgtggtaaagcatctgcagcagcggaacagccactttggcggcgcggatctggtgatcagcggcaatgtaccgcagggtgcggggttaagctcctcagcctcgctggaagtcgccgtcggcaccgtgttccaacagctgtatcatctgccgctggatggcgcgcaaatcgccctcaacggccaggaggcggaaaaccagttcgtcggctgcaactgcggcatcatggatcagctgatttcagcgctgggcaaaaaagaccacgcgctgctgatcgactgccgttcgctaggcaccaaagccgtctcgatgccgaaaggcgtggcggtggtgatcatcaacagcaactttaagcgcactctcgtcggcagcgagtacaacacccgtcgtgaacagtgcgaaaccggcgcgcgcttcttccagcagcccgccctgcgcgatgtcacccttgagcaatttaacgccgtcgcccatgagctggatccggtcgtcgcgaagcgcgtacgccacgtgctgacggagaatgcccgcactgtggaagccgccagcgccctcgaaaaaggcgacctgaagcggatgggtgagctgatggcagagtcccacgcctcgatgcgtgatgatttcgagatcaccgtcccgcagatcgacaccctggtggagatcgttaaggccgcgatcggcgataagggcggcgtgcgcatgaccggcggcggctttggcggctgcgtggtagcgttaatcccggaagatctggtcgataccgttcagcaggccgttgccaacgagtatgaagcgaaaaccggtattaaagagacattctatgtctgcaaaccgtcacagggggccgggcaatgctaacgcaaaccaccgcgctggccccggacggccggccatggcagcaggtgaccctgcgcaataagtcggggatgaccgtcaccgtggcggactggggcgcgacgctgctcagcgccgaggtgccgctggccgatggcagcctgcgccgaccgctgctgggctgcgcaaagctggaagactatgctcgccaggccgcatttcttggcgcctcggtaggccgctacgccaaccgtatcggccacagccgcttcccgcttgacggccaggtcgtcaacgtcacgccgtcaaacgacgcgggccaccagctccacggcggcccggaagggtttgataagcgccgctggcgcattgtccgcgccgacgagcaggaagtgctgttcgccctgacctcgcccgatggcgatcaaggctttccgggcaccctgcaggccaccgcgcactatcgtctgagcgacgataaccgcatcgcgattacctatcgcgccaccgtggaccaaccctgcccggtgaatatgaccaatcacgtctatttcaacctcgacggtgagcagggcgatgtgcgccagcatcagctccagatcctcgcccagaggtatctgccggtggaaagcgacggtatcccgggtggcgaactgaaagatgttgctaacaccagctttgatttccgccagccgaaaaccatcgccgccgacttcctcgcggatgccgatcagcaaaaggtgaagggatacgatcatgccttcctgctggatgccaaaggcgacgccagccagcctgcggcacaggtctggtcgcaggatggcaagctgcagatgacggtctatacctccgctccggcgctgcagttttactccggcaactatctcggcggcaccccgtcgcagacgacggagccctacgccgactggcagggactggcgctggagagcgaattcctgccggattcgccgaaccatccgcaatggccgcagccggactgtgtattacgtccgggccaggagtacgtcagcctgacggaatatcagtttatcgcccgataatcgccagcgccctccatcagggggcgctgcttttcgtccccgccctcctctctgccgcctcttttttcagcaacctgctctattttccgtcaccaaaggacaaaaaaataacctgtgtattacaagcaccttacactgcgccactattttcgctatggttagggataagcattgccgtgcgccaaatcacggcaatataatgagaatagttatcaatcaataacacatacaccatcacattcagcgcgccgttcgcggcgcgagggatggcgtgtagagaggagtgagagaatggctgtaactaagctggtactggttcgtcatggcgaaagccagtggaacaacgaaaaccgcttcaccggttggtacgacgtggatctgtccgagaaaggcgttagcgaagcgaaagcagcgggtaaactgctgaaggctgaaggcttcagctttgattttgcttatacctccgtgctgaaacgtgccatccacaccctgtggaacgtgctggacgaactggatcaggcctggctgccggttgagaaatcctggaagctgaacgagcgtcattacggcgcgctgcagggcctgaacaaagcggaaaccgctgaaaaatacggtgacgagcaggttaaacagtggcgtcgcggcttcgctgtcactccgccggagctgaccaaagacgacgagcgctacccgggccacgatccgcgctatgcaaaactgaccgacgccgaactgccgaccactgaaagcctggcgctgaccatcgaccgcgtcgtgccttactggaacgaaaccattctgccgcgcctgaaaagcggtgagcgcgtgatcatcgccgctcacggtaactccctgcgcgcgctggtgaaatacctcgacaacatgggcgaagacgagatcctcgaactgaacatcccgaccggcgtaccgctggtatatgagttcgatgaaaacttcaagccgatcaaacattactatctgggcaatgcggaagagatcgcggcgaaagcggctgccgtcgccaaccagggtaaagcgaagtaatttctcctggtgagaacaaaaaagcgtggaaatctccacgcttttttatgacctgcgctagcgcggagtagcttagccgcggcgggttttcaccgcttccgccagctgacgcaggatcgtttcggtatcctcccagccgatgcaggcgtcggtgacgctcttgccgtaggtcagcggttcaccgctctcgaggctctggttgccttccaccagatggctttcaatcatcacgcccataatggcgcgctcgccgccggcgatctgctggcatacgtcggcgcccacttccatctgcttcttgaactgcttgctggagttggcatggctgaagtcgatcatcacctgggccggaagacccgctttcgccagaccgattttcacctccgccacgtgcttcgcgctgtagttaggctctttgccgccgcgcaaaataatatggcagtcgccgttaccgctcgtattcacgatggcggagtggccccacttggtgaccgacaggaaacagtgcggcgcgccggcggcgttaatcgcatcgatagccaccttgatggtgccatcggtaccgtttttaaagcccaccgggcaggagagtccggaggcgagctcacggtgcacctgggattcggtggttcgcgcgccaatggcgccccagctcatcagatcggcgacatactgcggggtgatcatatcgaggaattcccccgccgccggcaggccgctgtcgttaatgtccagcagcagtttgcgcgcgatgcgcaacccgtcgttgatgcggaagctgttatccatatggggatcgttgatgagccctttccagccgacggtggtgcgcggtttttcaaaatagacccgcatgacgatctcgagctcgcccttcagcgcctcgcgcagggtcagcaggcgggcggcatactctttcgccgctgccggatcgtgaatagaacaaggcccaatcaccaccagcagacggtcatcgtcgcctttgaggatctgatggatagctttgcgagcatgtgcaacggtgtttgcagcattttcggtagcagggaatttttccaggagcgcaacgggaggtaataattcgttgatctctttaatgcgtaaatcgtcgttctgataattcatcttctttccagcgttgccatacttattcaatgaaatgcaatccctccaatctatctcttcgctgaaatagtgtaaacgtgattttacagtagtgatggaataatcctggaaataggcaaaaatacgccataaagtagcgaaaccaggctcatgaactacaatatttaactgttaaagctaattaagtcttacgtttcaggattatatagtgacactgcgatcgtctgcggagtcttaaaccatagcgagtcagatccctggcacactcaccgcgggaagcgcatttccccttcccggcttaacaggagtatccgatgaatatgaaaaaactgacgacccttttgctcaccgccaccttaggtcttgccagcggcgcggccctggcggcagacaccggcgcccagtccaataatggccaggccaactcttccgcggatgccggtcaggtggcgccggatgcccgtgagaacgtggcgccgaacaacgtggacaatagtcagatcaactctggctctgggggcaccacgggctcgacgatgacccaggataatatgtcgagcgatgaggtacataaaaactcgatgtgtaaagacggccgctgtccggacaccggtaaaaaactggacaacggcggcaatacgacccaagacaacagcaaaaccgacggcaccacccagtaacacatgaggtgggcagatcgaagaaaaggcgagccggtctcgccttttcttcgttttttatcgctctctgtttatgatgtcatagcgtaataatgataactattaagggacgacactatggcgcactcgcattcgcactcctctgtccaggctccggataacagcaacgcccgccggctgctatgggcgtttatcgtcaccgccggctttatgctgattgaagccgtcggcggcgcgatctccggctcgctggccctgctggcggatgccggccatatgctcaccgactccgccgctctgctgtttgcgctgctggcggttcgcttcgccagccgcccaccaaatgcccgccatacctttggctggttgcgtttaaccaccctggcggcgtttctcaatgctattgctctggtggtgatcaccatgctgattgtctgggaggcgattcagcgcttccagcatccgcagccggtagccggcgtgacgatgatggtcattgcagtcgccggtctgctggccaacgtgctggcgttttggatcctacatcggggtagcgaggagcggaatcttaacgtacgcgccgcagcgctacacgtgcttggcgacctgctgggctcggtcggcgcgatcgtggcggccgtggtgatcctcaccaccggctggacgcctgtcgacccgattctttccgtgctggtttcctgcctggtattacgtagtgcctggcgattactgaaagagagtctgaatgaattgctggaaggcgcgccgcgttcgctggatgtggcggccctgcagcgggatatccgtcgctctatcccggaggtacgcgatgttcaccacgtccacgtctggctggtgggggaaaaaccggtgatgacgctccatgtacaggtcgttccaccgcacgatcatgacgcgttactcaaccgcatcctgcatttcctggaacataaatatgaaattgcgcatgccacggtgcagatggagtaccagccctgcagcggcccggagtgccatctcaacacgatgcacgccgggcacgatcatcaccaccaccattagccagaaaacgcgtgagaacctcgctcacgcgcgctgtttatccacatccggctgccgttcaacgcaatgaacgtcagcaagaggtattccagcgacatggcatagacgccctgacgggcaaaaatcaccacgcttatcacgttgacgatcacccacagcagccagttttcaacatacttgcgggtcattaagatcatcgccaccaccgacagcaccgtcatacaggagtcccagaacgggaaagcatccggctgcagttccggcatagtgacctgcaaaccgagcgcttgcatcaggctgaccgcgatccgcgtcaggaaagcaaagaacgggttgataaacagggtcagcaagccgatcgctaccacgcaggccgccagccagcccagcgctttgctgcgcggcagccagcggatctgcagctcagcctcatggttgctgctttgtcgcgaccatgcataccagccgtaaacgttagcggcaaaaaagaacagctgcagcagcaggctggcgtaaagctggatctgaaagaagatgatggcgaacagcgtgacgttgaccagcccgaaagcatagttactgatcttctccaggctcgccagccagatacacaacagcccggcaatcgtccccacggcctctatccaggagagatcgtaccccccagcgccgatgggtatatgtactaaaatattctgcgtgctaaaaaaatccatttcctcccctcagcgtctggcgacgcgacaataggttatccccgtagtgtagccgcaaaatccagcatccggttaaggggaattaatgcgccggttcgcagcgcttcgtcgacatggatttcatgttcagcgccgccctgctcgagaccctcggcaatggctttcaggccattcatcgccatccacggacaatgcgcgcagctgcgacaggtcgctccttcgccggcggtgggcgcttccagcagcgttttctccggcaccgcctgctgcattttatagaaaataccgcgatcggtggccacgatcagctggcgctggggcaggcttttcgccgccgcaatcagctggctggtggagcctacggcatcggccatctcaacgatcgcctgcggcgactcgggatggaccagcacggcggcttcgggatgcagagccttcatccgcatcaacgcctgggttttaaactcgtcgtgcacgatgcacgccccctgccagcacagcacgtctgcgccggtctgacgctgaacgtaacgcccaaggtggcggtccggcgcccagaggatcttttgaccaagactatccagatggtcaatgagttccacggcgatgctggaggtcaccacccagtcggcgcgggccttcaccgcggcggacgtattggcatagaccacgacggtgcggtcaggatgggcgtcgcaaaaggcgttgaattcctcaatcggacagcccagatccaatgaacactcggcgttcagggtcggcatcaaaatggtcttttccgggctgagaattttggcggtttcccccataaaacgcaccccggcgaccagcagcgtggaggccgaatggcgggcgccaaagcgcgccatctccagcgagtcggcgatacagccgccggtctcttccgccagctgttgaatttcaggatcggtgtagtaatgcgccaccatcacggcatcgcgctcgctcagcaggcgcttgattttttcgcggtaaaactgcttttcgtcgacggtcagcggctgcggtttagcagggaaaggataaatcgccgtttcaggatcaaacattacgctcatcatgcaatctcgttttactggcttaactctacaaccgtctgtaaggcctttcggcggcttaacacggtcatggtgttttatatgctaaacaagatagccgattacgagctaaaagtcgtgatgaattttgtacatcagacccttttcccggggacggtgctgcgcatctgcccgaacgaccggttcgtaccctatgcaggcacggtaagcgcagcgtgaccgtgggaaaataatgaattaagaaattattaacattgatgagtggcagggaaatgcagatagcaaaaaggcgcctttagggcgcctttttacattggtgggtcgtgcaggattcgaacctgcgaccaattgattaaaagtcaactgctctaccaactgagctaacgaccccttgcgggattttactgctgccatcattcaggatggtgggtcgtgcaggatgactcgacttcgcctcgcccttcgggccgttgctgtcgcaacgttatccttcacgttcagcatctgagttaaatgctgaaattggtgggtcgtgcaggattcgaacctgcgaccaattgattaaaagtca

SEQ ID NO: 5331 - DNA, 285015 bp, Unknown
  gut microbiota DNA sequence
ctctggtgctacctgaataacttcactcgacaccaattcagaaattggtaggtcgtgcaggatgactcggctttgcctcgcccttcgggccgttgctgacgcaacgttatccttcacgttcagcatctgagttaaatgctgaaattggtgggtcgtgcaggattcgaacctgcgaccaattgattaaaagtcaactgctctaccaactgagctaacgacccgagtggtgggtgatgacgggatcgaaccgccgaccccctccttgtaagggaggtgctctcccagctgagctaatcacccgaaactgcgctggatactaccgatactgcgtccacctaccccatcataaaaatgattggagtgcaggatgactcgcttcgctcgcccttcgggccgtagctgaagcaacgttatccttcacgtttaacaccgacgtacgatgttaaagatggtgggtcgtgcaggattcgaacctgcgaccaattgattaaaagtcaactgctctaccaactgagctaacgacccggtggtgggtgatgacgggatcgaaccgccgaccccctccttgtaagggaggtgctctcccagctgagctaatcacccgatactacgctggatactactaagcggtgggtcgtgcaggatgactcggcttcgcctcgccctacgggccgttgctgacgcaacgttatccttcacgttttactatcgcgttccaccagaacgattggtgggtcgtgcaggattcgaacctgcgaccaattgattaaaagtcaactgctctaccaactgagctaacgacccactctggcattgctttgggcttgtttgatatcccttggcaacggcggcatatattactgatttcagaattcagcgcaactaaaatttcgataaagatcacttaactgctggcgattcaggcgacaagaccagaaataacgcgatttctggtcatgccgtaatcaaccaagagcattaagtcgtttttgcgcttgtttcgcaccgtcggtgccggggaatttattgatcacctgctggtaaaccgctttcgctttcgcggtatcacctttgtcctgcatgatcacgccgactttaaacatcgcgtcaggcgcttttggcgatttcgggtagttcttcaccaccgaagcgaagtaaaacgccgcgtcgtcttttctccccttattgtagttcaactgcccgagccagtagttagcgtttggctggtaggttgaatccgggtactttttgacgaagttttgaaacgccaccatcgcgtcatcctggcgtgaggcatccttcaccagggcaatagcggcattataatcggtgttcgcatcgccggtcatcgccggggcgcctgaggtggccgctggcgctgcgctggtggcagccgcgctctgatcgccagaagacgacggagcctgcgcacctgatgcagcgccgccaccgctgctcaaactatctatctgcagcagaatctgtttctggcgctcaacgatctgattcagctggtactggttctcctggatctgcccgcggagagaatcaatgtcagtctggttatcagagagttgttgctggagttgggttaaaagctggctgtgagcattggaaatacgctcgagttgagtgacgcggtcttcgaccgagcctgagccgacactactgattggcgcctgagcaaaagcggcccagggggccgctatgccaaccagtaacgacagactcaataaatgatgtctgaagttactgctcatgcaattctcttagtaaaccagtacggcgcgacggtttttggcatatgccgcttcgtcatgacccagtactgctggtttttctttaccgtaagaaacgatggagatctgatcggcagaaacacctttgccctgcagatacatcttaacggcgttagcacgacgctcacccagagcgatgttgtattccggcgtaccgcgctcatccgcgtgaccttctacagtcactttgtaggacgggttgctgcgcaggaagttagcatgcgcgtccagcatagcagcgaagtcagaacggatatcgtatttgtcgagatcgaagtaaacgatgttgttctgctgcagctgctgcatctgcagacgagcttgctcttcagaagacatgttgccgccgttaccgttagcgtccataccagtgccggcacccagcatgccttcaccgctctggtcgttgctggcgttcttgttagaagaacatgccgcgattgccataaccggcagagcgatcatcagccctttcagcactttgttcagttgcatttctttgattcctttaataatcaattatttattatcacagatacggcgaccaggcaggcgattttacctgtccatcagttgccggaagacgcgctttgaaacgcccatctgtagaaaccagattcagcacggatcccatcccctgagaagagctgtagattaccatagtgccgttaggtgccagacttggcgtttcgtctaaaaacgttgatgacagaacctgtacaccacccgtttccagatcttgtttggcaatgtgctgctgaccgccggccgagctgaccattaccatggttttaccatccgcgctcacgtcggcgtcctggttctgagaaccttcccaggtgatacgctgcggcgtgccgccattaatgttgactttatatacctgcggacgacctgcctggtcagaggtgaaggccagattctggctgtccgggaaccagcttggttcggtgttgttgctgcgaccgttggtcacctgacgaatctgaccggatcccagatccattacgtacaggttcaggctaccggttttcgacagcgcgaacgccagtttagaaccatccggtgagaacgccggggcgccgttgtgctgcgggaaggaggcgatctgacgcacagaggcgttcgccagggtctgaaccaccagcgcagaacgaccgctttcaaaggtaacgtaggccagtttagaaccgtccggagaccaggccggggacatcagcggctgggaggaacggtgaaccaggaactggttgtaaccatcgtagtcggacacgcgcagttcgtaagggtactggccgccgtttttctgcaccacgtaggcgatacgggtacggaaggcgcccttgatgccggtcagcttctcaaataccgcgtcgctggccgcgtgcgccgcatagcgcaggtactgcttagtgactttaaaagaaccttgcgccagcgttgtgcccggcgctccgccggtgtccaccagttgatacgcaacctgataagaaccatccggattttgcgtgacctggccgacgactacggcgtcaatacccagcgcagaccaggcagcaggctgcacttcctgggcactggtcggctgctgcggcagacgagagcgatccagcggattgaatttaccgctgttgcgcaggtcagctgccacgataccaccgacatcttccggcgcagcgccctggccggcccactggaacggtaccacgccgatagggcgtgccgagtccaccccctgggtgatctcgatacgtacttctgcgtgcagcaccgccgcccacagcattaaaaaaccaaatgctactcgtaatgcctgcttcatcatatctcccttatccgggcggaaagcccacgataatttagcagaatgttaacaaactcaaatatacaaaactaccaaaaccctgtgactaccatagattgtttttccccgtttgcacggggaaaaatgtcactgaggtttgaagtccagtggcgcatttttgaagacttcatatactgcctggctaggtggtttcggaaacttagcctgtcgagctgcggcaagagcggcctggcacagagcaggatcaccaccttcggactgtatatttaacaacaggccgtcaggagcaagtttgatacgcaaggtacatgttttgcccgcataggacgatgcgtcataaaacttactttcaatcgccgattttatctgtccggcatagttgttgatatcagcccctgaggcactgtttttagtattaccactcccggcagcggaggcattgtttcctttggccccaccgcctgttttaggcgcattcttaccagaactcagatcgccgagcaggttgtcaacgccgtccgcttctttcgcagccgccgctttcttcgccgccgcggcttttgctgctgccgctttggccgctttatcagctgcagccttctctgctgcagccgctttcgctgccgccgctttttcagcggctgcggctttctcggcggcggccttctcagcggctttttcggcagccgctttttcagctgccgcctgcttagccgcttcctgctgggcttttttctccgcttcctgttgcgctttcttcgcagccgccgcttccgctttcttctgcgcctcggccgcagctttcgccgcttcagcttccgcctgtttcttcgcctcggcagcggctttcgctgcagcggcttcggcctgcttcttcgcgtcagcagccgccttggccgccgcctgttctgccgctttcgcctgggcatccgccttcgctttcgcctcggcggccgctttggcagcggcttcctgcgcttcttttgcctgtgcgtccgctttggcttttgccgccgcggcggccttggcagccgcttcttcagcctgcttctgctgctccttcgcttctttcgccgcttcctgcgcctgcagccgctcctgttcgagctgtttcagccgctcctgttccgccgcctgtttctcacgtaactcttccgcctgctgctgcgcctgtttttcacgctgttcagcggcgcgacgtgcgctggcctgctgctgttgctgacggttatagttatttaccaccgcccccggatcgaccatgacggcatcaatcgacgatccgccgccgccgccggcagaggcatccagatgctcgtcaaacgaactccagatcagcagcgcgatcagaatgatgtgcagcgcgactgaaatgatgatcgctcgtttaagcttgtcgttttgttcggttgcctttgacactatcggttcccaaaaactgttcgcctgtatccgcgatgcgcaccgacggcgagcgatacccgccaccggacgccgcgcggacgcacctacctgaagcgattaaataggtttggtcatcaagccgaccgatttaacccctgcactatgcaacaggttcagcgctttaataatttcatcgtaagggacgtctttcgcaccgccgatcaggaataccgttttttcattggcttcaagacgacgcttcgcttcggcaatcacctgctccggcggcagctgggacagcgtctcctgccccacctttacgctgtactgccctaccccggagacttccacaatcaccggcggatcgtcattgcttttcaccgcttgcgattccgtggcgtccggcagatcgacttccacgctctgcgtaatgatcggcgccgttgccataaagatcagcagcagcaccagcaggacatccagcagcggaacgatgttgatctcggacttcagttcgcgacgtccgcgtccacgtgctctggccatggcttaccccttattgctttcgctggtggtaaaggcctgacggtgcagaatagcggtgaactcttccataaagttgtcgtaattcagttcaagcttgttcacgcgctggttcaggcggttatacgccatgaccgccgggatcgcggcgaacagaccaatcgcggtggcgatcagcgcttcggcgatacctggcgccaccatctgcagggtggcctgcttcaccgcgccaagggcgataaaggcgtgcataatcccccagacggtaccgaacagaccgatatacgggctgatcgagcctacggtgccgaggaacggaatatgggtctccagcgtttccagttcgcggttcatcgaaatacgcatcgcgcgcgatgccccttcgacaatcgcttccggcgcatggctgttggcccgatgcaggcgtgcaaactctttgaaaccgctgtagaagatttgttccgaaccggtcaggttatcgcgacgcccctggctctcctggtacagacgagagagctcgatcccggaccagaatttgtcctcgaacgcttcagcttcacgcgcggccgagttaaggatacgcgttctctgaataatgatagcccaggaagcgatagaaaaaccaatcaaaatcaacatgataagttttaccagaaggctcgccttcaggaacaaatcaaggatattcatgtcagtcactgcttaaactccgcgacaatagacttgggaagcgcacgtggcttcattaagagtggatcaacgcacacaatgagaacctcagcttcgtttaacactgtattctcggcgttgacgattcgctgcgtgaaaaccaaagaggtgccgcgcatcgaggtaatttccgtctggacttcgagcatgtcgtcgagtctggcgggggcaaaatactccagcgtcattttgcgaaccacgaaggcaacgcgttcagccaacagcacctgttgactaaagtgatggtggcgcagcatctctgtgcgtgctctttcataaaaagcgacgtaactggcgtggtaaaccacaccaccggcatcggtatcttcgtagtagacccgaaccggccatcgaaacagcgttgtattcactttacatcccggtaatgcaaaaaaaggttagagctttcaaacttcgctactatacgcgcgggaaaggtggtttggaatgggggaaagtaaacggggcgtaaatttttatgggcttatgcaagcccatagcattaacagagatctcttattcaaaagaagaaaaagaagagacctaaagcgagcacgatatcagcgataagcggacaaaaaatcccctgccagtgaacggcacgcgggcgaaagcccacgccgtgaataacgccgctgcaaaccgcccacatcagcaagaaaccatgccagatttccagctcgctggtcttcgccgcaaagcgcgacggatcccagaaaatgcagccagccagcagcagcgccatcaataaggaaagcgcccggagcgggcgcttgtccattatcgcgtacagagtagcgataaatttcatcagatttcttctttcttcccggctttggtggcttccacgtgctcaagcgccagcgcggtaatgaccccaaaagcacaggcaagaagcgttcccaaaatccatgcgaagtaccacatatatagctccttaccttagtacagcgagtgggtattcttttcgatgtcttcgcgcgtgatgcggccaaacatcttccagtaacaccagctggtgtaggccagaatgatcggcacgaaaacaatcgccacgtaggtcatcaggttcagcgtccgctgactggaggtcgcgtcccacattgtcaggctggcgttcagcatggtgctggacggcatgatgaacgggaacatcgcgataccggcagtcagaatgatgcaggccagggtcagcgaggagaacaggaatgcccaggcacctttatccgctttggtcgaaacgacggtcagcagcggcaacaccacgcccagggcaggcaccgcccacagcgctggcatattgttaaagttcaccatccacgcgccagcttcccgcaccacttccttggtcagcgggttagacgggccggtatggtcaatcaccgatttcaccacatagccgtcgatgccgtagtagacccacacgcccgccagcgcgaagcagaccagcgtcaccagcgccgccaccatggaaacggtgcgagtacgcaggtgcagttcgcctacggtacgcatctgcaggtaggtggcgccctgagtcaggatcatcgccacgctgacgataccggccagcagaccaaacgggttcagcaactggaagaagttaccggtatagaacagacgcaggtattcatcgacgtggaacggcacgccctgcagcaggttgccaaaggccacgccaatcaccagcggcggcacgaagctaccgatgaagatgccccagtcccacatgttgcgccagcgggtgtcctcgatcttggaacggtagtcaaaaccgaccggacggaagaacagcgaggccagcaccagaatcatcgccacatagaagccagagaacgccgcggcgtaaaccatcggccaggcagcgaacagcgcgccgccggcggtgatcagccacacctggttaccgtcccagtgcggggcgatggcgttgatcataatccgacgctcggtgtcgttgcggccgaggaagcgggtgagcatgcccacccccatgtcgaacccgtcggcgacggcaaaaccaatcagcagaatgccaatcagcagccaccagataaaacgcaatacttcataatcgatcatttgacgactcctgtcttagcgtgccgactgaatagccgcagaggactgttcaaagtgatagcggccggttttcaggctgctaggtcctttgcgggcaaacttgaacatcaggaacagttcagccaccaggaacagcgtgtacagaccgcagatcagcaacattgagaagatcaggtcgcccgcggtcaatgatgagttagccaccgccgtcggcaggacctcaccaatcgcccacggctgacggccgtattcggcaacaaaccagcccgactccacggcaatccacggcagcggcaggccgtagaatgcggcgcgcagcagccattttttctcgccgatgcggttacggatcacgctccagaaggaggcgcctataatcagcagcatcaggatgccgcacgccaccatgatacggaaggcgaagtacagcggtgcgacgcttggaatggagtctttggtcgctttggcgatctgctcttccgtggcgtcagcgacgttcggggtatagagcttcaacagcaggccataaccgaggtccttcttcacgttattgaactggtcacgcacggcctgatcggttgaaccggcgcgcagctgttccagcagcgcgtaggctttcatgccgttacggatacgctcttcgtgctgaaccatcagatccttgaggccgataaccggcttgtccaccgagcgggtagcaatgatgcccagcgcgtaggggatctggatcgcaaagtggttggtctgcgcattctgatcgggaataccaaacagggtgaaggccgctggcgcaggctgggtttcccactctgcttcgatagccgccagtttggttttctgcacgtcacccatttcgtaaccggattcgtcacccagcacaataacggagaggatcgccgccataccgaagctggctgcgatggcaaaggagcgcttggcaaaggcgaagtcgcgacctttcagcatgtaccaggagctaatcgccaggatgaacatcgcgccggtgacatagcccgacgccacagtgtgaacgaatttcacctgggcgaccgggttgagcaccagttcagagaagctgaccatctccatacgcatggtttcgaagttgaagtccgatgcgatagggttctgcatccagccgttggcgacaaggatccacagcgcggagaggttggaacccagcgcaaccagccaggtgacggccatgtgctgaactttgcccagacgatcccaaccgaagaagaacagacctacaaaggtggattcgaggaagaaggccatcagaccttcaatggccagcggcgcaccaaagatatcgcccacgtagtgtgagtaatacgaccagttagtcccgaactggaactccatggtcagaccggtcgccacacccagcgcgaagttgataccaaacaacttgccccagaatttggtcatatctttataaatctgtttgccggaaaggacgtagaccgtttccatgatggccagcaggaacgccataccgagcgttagcggcacaaacaggaagtggtacatcgcggtcaaggcaaactgtaagcgcgacagttcgactatatctaacatcatgactccttgctcatcgcatgaagactccgaaaatgaaccgagaagctctggctcatacgcatgccccaatacaaatttatttgtcgcccgtccacagcaggtttcaatcgaaggtaaaaccatgccagggtaaggttacaaatacgttaacgaaaaacccaattgattccccaatatattacgccgcaataaccttacaataaatatgtttttattgttccagttttacatttttcgacggtgatcaatatatagtgaagatggctgaattcagccaatttgacttgagacaatttaacgttttttgagggatttttccaaggattaagtattgatataaatcaatttttactctatgtgttaattatgtagcccaataaagaatattggtgaacttaatgttaattaagtgtttaaactatggcttttccagttactaaaaagagagatatgagaatcataggtaatattatttaacgtcgtggaaaaaaacaaaaaaaaggaaccgatccgaataatgttagaccgctcacagtattttatctgcttccttatcccctgccccgcgctttttcgctgccgcttttgtttccatacggtacagccggggtatatttttttagccagtacagcgcatcgaaaatacttattaaataataaattaaatcaatatgatagatagggtttttcgcaaaaaatcaattcgttgttggcgctgcggttctgacgagacgggataacggtcacaaaaaaggccacctgacggtggccaaccatgtcgaaatcggacagatttctgcttgcggacaagcagagagggtttacttgataatagctttcagcgcttcgccgatgtcggccaggctgcgaacagttttcacacccgccgcttccagcgctgcgaatttctcatccgctgtacctttaccgccggcgatgatagcgcccgcgtggcccatacgcttgcctttcggcgcggtaacacccgcgatgtagccaacaaccggcttagtgacatgatctttaatataagcagccgcttcttcttccgcgctgccgccgatctcaccgatcatgacgatcgcttcggtctgcggatcttcctcgaacatcttcaggatatcgatgaagttggagcccgggatcgggtcgccgccgataccgacgcaggtagactggccgaagccgtagtcggtggtctgcttaaccgcttcataggtcagggtgccggaacgggaaacgatgcccactttacccggcttgtgaatgtgacccggcatgatgccgattttgcactcgcccggagtgataacgcccgggcagttcgggccgatcatacgcacgcccgcttcgtccagcttcaccttcacggtcagcatatccagcgttgggataccttcggtgatggtgatgataagcttaatgcccgcgtcgatcgcttccaggatggaatctttgcagaacggcgccggaacgtagatcacggtcgcggtcgcgccggtcgcttcaacggcttcgcgcacggtgttgaacaccggcaggcccaggtgagtggtgccgcctttgcctggcgtcacgccgccaaccatttgcgtaccgtaagcgatcgcttgttcagagtggaaggtcccctggctaccggtgaagccctggcagataaccttggtatctttattaattaaaactgacattatttcccctccactgcggcaacaacctgctgtgctgcgtccgtcagacttttcgctgcaataatattcaggccgctgtcagccagttttttcgcgcccagttcggcgttgttaccttccagacgtacaacaaccggaacgttaacccctacttccgctaccgcgccgatgatgccgtcagcgatcaggtcgcaacgcacgatgccgccgaagatgttaaccagcaccgctttaacgttgtcgtcagagaggatgattttgaacgcttcggtcacgcgctctttggtcgcgccgccgcctacgtcgaggaagttagccggttcgccgccgtgcagcttaacgatgtccatggtacccatcgccaggcctgcgccgttaaccatgcagccgatgttgccgtccagcgcgacgtagttcagttcccactgcgccgcctgcgcttcacgtgggtcttcctgagactgatcgcgcatttcgcgcagatccggctggcggaacagcgcgttgccgtcagcgcccagtttgccgtcgaggcagatcaggtcgccctgcttggtgatcaccagcgggttgatctcgatcagcgccaggtcgcgctcaaggaaaatggtcgccagacccatgaaaatcttggtgaactgctgaacctgtttaccttccagacccagtttgaacgccagttcacgaccctggtaaggcatcgggcccgccagcggatcgatggcgatcttgtggatcaggtgcggggtctcttccgccactttctcgatttccacgccgccttcggtagacgccatgaacaccacgcgacgggagctacggtcaacaaccgcgcccaggtacagctctttgtcaatatcggtcgccgcttcaaccaggatctggttaaccggctggccgttcgcatctgtttgataggtcaccagacgtttgcccagccagtgctcggcaaatgcgcggatctcttctttgctcttaactactttcacaccgcccgctttgccgcggccaccagcgtgaacctgacatttcactacccacggacccgcgccgatttttgaagcggcttcttctgcttcacgcggagtagtacaggcataacccaccggcgccggtaagccatagcgggcaaaaagttgttttgcctgatattcatgtaagttcatgtgttcagtccatccttcagggtgtaattatctttaaacctgtaggcctgataacggcgctaacgcgtgttatccggcctacggtaggtaatacgcttgctgactacacgtccagcagcagacgggtcggatcttccagcagctctttaatcgccaccaggaagcctaccgattcacgtccgtcgatcagacggtggtcataggagagcgccaggtacatcatcggcaggatctctaccttgccattgaccgccatcggacggtctttaatggcatgcatacccagaatagcgctctgcggtgggttgatgatcggcgtggacatcagggagccgaagacgccgccgttggtaatagtgaagttaccgccggtcaggtcgtctacggtcagcttgccgtcgcggcctttcactgccagctctttgatattcttttcgatatccgccatgcccagcaggtcgacgtcacgcagcaccggggtgaccagaccgcgcggagtggatacggccatgctgacgtcgaagtagttgtggtacaccacgtcgtcgccatcgatggaagcgttcacttccggatagcgtttcagcgcttccactaccgctttcacgtagaaggacataaagcccaggcggatgccatgacgtttttcgaacgcctcaccgtactgcttacgcagatccatgatgggcttcatgttgacttcgttaaaggtcgtcagcatggcggtagagtttttcgcttccagcagacgttcggctacgcgtttacgcagacgggtcatcggaacgcgtttttccgaacggtggcccagctgcggcgccggcgcggctgccggggcggcggctggcgctttggcttctgccggcgccggggctttcgccagatgtttctcaacgtcttcgcgggtcagacggccgccgacgccagtgcctttgatggccgctgggtcaaggttgtgttcagccagcagacgacggatcgccgggctcagcgcgtcgttgttctgctcttccagagaggcctgctgacgctgcgccggagtggacgctttcgcatcggctttctcgctgctttctttacctgcgctgttgccttcgcgcaggcggccaaggatctggcgagacaggacggtggcgccctcgtcttccagcactgcatccagaatgccgtccgctgatgccggtacttccagtaccactttgtcagtttcgatttcgaccagaacttcgtcacggacgaccgcgtcgcccggttttttgtgccaggtggcgacggttgcgtcagctacggactcaggcaggtcgggaaccagaatatctacgctactcattgtgtatcctttaattaatcgacgttcagcgcgtcattgaccagatcttgttgctgtttctggtgaacggacatataccctaccgccggagaggcggaggccgggcggcctgcataacgcagagaggccccaaacggaatcacttcacggaagtgatgctggctgcagtaccatgcgccctggttgagcggctcttcctggcaccagacaaaatcatgcacgtgcgcatacgctttcagcgcttcctgcaccgcctgatgcgggaacggatagagctgctcgatacgaacgatagcgacatctttttgctcgtttttgcggcgctgttccagcaggtcgtagtaaaccttaccagagcacagcacaacgcgcttcacagcctgcggatcaagttgatcgatttcaccaatagccggcaggaaagtgccgttcgccagctcatccatgctggagaccgccagcggatgacgcagcagcgacttcggcgacatcaccaccagcggacgacgcataccgcgcagcgcctggcgacgcagcatgtgataaacctgtgccggcgtggacggcacgcagacctgcatgttttgttcagcgcacagctgcagataacgctccagacgcgcggaggagtgctccgggccctggccttcgtaaccgtgcggcaggagcatcaccaggccgcacatcctcccccacttctgctcaccggaggagatgaactggtcgatcaccacctgcgcaccgttggcgaagtcgccaaactgcgcttcccagatggtcagagtgcgcggctcggcggtggcgtaaccatattcgaacgccagcaccgcttcttcagacagtaccgagtcccaaacgcggaactggccctggccgttatggacatgctgcagcggcgtgtaggttgaaccattggtctggttatggatcaccgcatgacggtggaagaaggtgccgcggccggagtcttcgccggacagacgaaccggaataccttcgtcaaccagcgtggcgtaggccaggttttcggcaccgccccagtcaaacagcttctcgcctgccgccatcgcctggcggtcggcgtaaattttcgccacgcgggactgcatttcgataccttccggtaccgtgctgatgcgtttggccaactcctgcagacgtttcggctcaactttatccggatagctctcgtcccactcgtggttgaggtacggcgaccaggtaaaggaatgcatattcatcggacgccattcctgcaccacgcattcgccggcatccagcgcatcgcggtagaggttaacctgctcggtcgcatcttccagagtcgccaccttctcctgctccagcttgtcagcatagattttgcgcggagtcggatgctttttgatcttctgatacatcagcggctgggttgcgctcggctcatcggcttcgttgtggccgtgacggcggtagcacaccaggtcaatgaagacatcgcgtttaaaggtattgcggaaatcaagcgccagacgggtgacgaaggcgaccgcttccggatcgtccgcattgacgtggaaaatcggcgcctgcaccattttaccgatgtcggtgcagtacggcgttgagcgcgcatccagcgggttagaggtcgtgaagcccacctggttattgataacgatgcgcacggtaccgcccacttcgtaaccgcgggctttggacatgttcagagtttcctgaaccacgccctggccggtgacggcggcgtcgccgtggatggtaataggcagaactttgttgctgcttggctcgtccagacgatccagacgggcgcgtacggaaccgataaccaccgggctgacgatctcgaggtgcgacgggttaaacgccagcgccaggtgcaccagaccgccttcggtttccatatcggaagagaagcccatgtggtacttcacgtcgccggtgccgaggtgttctttatgtttgcccgcgaactcgtcgaacaggtcctgcggttttttacccagcacgttgaccagcacgttgagacggccgcggtgcgccatgcccagcaccacttcgcgggtgccgcttttgcctgcatggcggatcatctctttgagcatcgggatcagggcgtcgccaccctccagcgagaagcgcttcgcccccgggaatttggcgccgaggtagcgctccagaccttccgcggcggtcagttcgctgaggaagcgttttttctcttccgcggtaaagctcgctttgccagctaccgattcaatgcgctgctggatccagcgtttttcttcggtagaggtgatatgcatgtattccgcgccgatggagccgcagtaggtttgcttgagggcggcaatcagctcgcccagcttcatcgtgtctttaccgatggcaaatgaacctacgttatagctttcctggaaatcggcctcggtcagatcgtggtaggccggatcgagatccgccactctctcttgcttccacagccccagcggatcgagattcgcatgctggtggccacggaaacggtatgcgttgatgagctgcaggactttaacctgcttcacattggtgtctgggtcggaaatcgaagaagtgtaacgtgaggcatccttcgccagtcgacggaaataatcacgcgttttggaatgaaattgatccggtttaactccggtgccaggtaactgctggaacattgaacgccagttggcgtcaacagagtcaggatcggttaagaagtcttcatagagctgttctatccagctctggttcgaaccagagaggtaagaagagtccagccaggctttcattgcgccgttctgcatcgtgatcccttaagcattcatatgcttatttcgccgtagaaactaccacgcacaccgagtgcacgtgccggggttcacttgttgcggacgagttgtggtttctatccgctaaggaacctttaaaaactgccattaatcttcagcgttcaggctgcggttgcgttggctgccttcgcttaccccggtcacatagttcactatgctcccggggatgcgctcagttgccgccttacctcgcactgaacgcctcgattactggtacatcttgtggcggtttttaaagatttcctgctatatcccccggcggcgctaacgcttgccggggctactgctttggtagcccggataagcgctagcgccatccgggacagaccgtgttgcttacgcgctgcgctgcagcagcatcgacttaatatggccgatggcgcgcgtcgggttcagccccttcggacacacactgacgcagttcataatgctgtgacagcggaatacgctgaaagcatcgctcaggccgtccaggcgctcgctggtttcggtatcgcgactgtcgatcaggaagcgatacgcggccagcaggccagccgggccgatgaacttgtccgggttccaccagaacgacgggcacgaggtcgaacagcaggcgcacagaatacactcgtacagcccgtcgagtttctcacgctgctcaggcatctgcagatgctcgcgagccggaggattttgcccattattcaacaagtaaggcttaatcttctcatattgtgcatagaattgccccatgtccaccaccaaatcacggataaccggtaatcctggcagcggacggataacaatcttcttgcccggctgattcagcgcggagatcggcgtgatgcacgccaaaccgtttttcccgttcatgttcagaccatcggacccgcagaccccttcacggcaggagcggcggaacgacagcgacggatctttttctttcagctggatcagcgcatccagcagcatcatgtcgcgaccttcttccgcttcaagggtgtaatcctgcatgtgcggagcgtcgtcaacatccgggttatagcgataaattgaaaactcgagtttcattttcctgtctccgcattagtaagtacgaatcttcggcgggaatgccggacgcagtttcggttccatattgacgctacgacgcgtcatggattccgactctggcaggtacagggaatggcacagccagttttcatcatcacgatccgggaagtcgaagcggctgtgggcgccacggctctcggtacggaagttagcggatacggcggtcgcgtaggcggtttccatcaggttatccagctccaggcactcaacgcgctgggtgttgaactcgctggaggtatcgtcgagacgggcgtttttcaggcgctcgcggatcactttcagttgctccagacctttgtgcatcgcatcgccttcgcggaacaccgagaagttatgctgcatacattcctgcagcgctttacgaatcgccaccggatcttcaccagagcgggtgttgttccagcggttgaggcgatccagcgagccttcgatatcggattcgctagcgtcgcgcagcgtgccctgctcggcaatggattcctgcagatgcaggcccgccgcgcggccgaagaccaccaggtcgagcagcgagttgccgcccagacggttggcgccgtggaccgatacgcaggcgatttcgcctaccgcgaacaggcccgggatcaccacgtcttcgcccttttcattcacggtcaacgcctggccggtgactttggtcgggataccgcccatcatgtagtgacaggttgggataaccgggatcggctctttcaccggatcgacgtgggcaaaggtacgggaaagttcaaggatacccggcagacgagattccagaacctctttaccgaggtgatccagtttcagtttcgcgtgcgggccccacggaccgtcgcagccgcggccttcgcggatttcgatcatgatggaacgcgccaccacgtcacggcccgcaaggtctttagcgttcggggcataacgctccataaagcgttcgccgtgtttgttcagcaggtaaccgccttcgccgcggcaaccttcggtaaccagaaccccagccccggcgataccggtcgggtggaactgccacatttccatatcctgcaccggcacgccggcgcggatggccatcccgacgccgtcacccgtattgatgtgggcgttggtggtggactgatagatacggcctgcgccgccggtcgccagcacggtggcgcgggctttaaagtagaccacttcgccggtctcgatgcacagggcggtacaaccgactaccgcgccgtcctggtttttcaccagatcgagggcgtaccattcggagaagatagtggtgtggtttttcaggttctgctgatacagagtgtgcagcagggcgtgaccggtacggtcagccgccgccgcggtacgcgccgcctgttcgccgccgaagttcttcgactggccgccaaacgggcgctgataaatacggccatcgtcaagacgagagaacggcagtcccatgtgctccagctcaagaatcgcttccgggccggtcttacacatgtattcgatggcgtcctggtcgccgatatagtccgacccttttacggtgtcgtacatatgccattcccagttatcttcatgggagttaccgagcgcgacggtgatgccaccctgcgcggatacggtatgggaacgggtagggaacactttggagagcagtgcacaggtctgtccgctctgggaaatttgcagcgccgcgcgcatacctgcgccgccggcaccgatgacaacagcatcaaactctctgactggcaatttcattacacaccccacaccacaacaaatccataaagaacgtaagccaccagcgccacaacgatagccagttgcagaaccaggcgcagagccagtggtttaacgtagtctgttaacacctgccacatcccgatccaggcatggatgagaatggaaacgagagccagcagagtgaagaccttagtgaagccggaggcaaagaatccggtccacacttcccatgagatttcaccggtggtggcgaagaagccaaccatgtagatgatgtagagggtcagaacgatggcggtagcacggaccaggataaagtcatgtacgccgttgcgtcccagtgctgaggcgttgcttaccatacgaggactcctgcgagaagtgaaagcacgacagtaataacaaaagaaattttggcggaacgtttccctgcttcgagggtttcgtcaaggtagccaaagtccatcatcagatggcgaataccgacaacgacgtgataggccagcgcggtgagaatgccccacatgatgaacttcacaaagaagctatccatgatggaggccgccgtcagaaaaccttctggggaggaaaggctggtgcccagcagccaaagcagaattccgaccgccacgaaggtgatgacaccggaaacgcgatggagaatggacgctatcgccgtgattgggaaccgtatcgtttgtagatccagattgacaggtctttgttttttcacatttcttaccatgaataacgcccacatgctgttcttattgtttccttcctccggtctgcttgcgggtcagacagcgtcctttctataaccagaagtcatgttaaaacgtcttttcaggcattaaaacatcactaaacaacgctgggtggctcgggattgcagggtgttccggagacctggccgcagtataggccgttcacaaaatcattacaattaacctacatatagtttgttgggttttctccggaacagtgatcaaggtcacgataccaacatttttttaatttttaatcacctgatttgacaaatattaaacattcttgttacaaccattaccagttaaatgcaataatgctcaaaagttatggggtcactctttcacctgagaataagttatgtaacagtgtgtcagtattgaccgatgtaatcaggacagttattagtggtatataggttttaatattcggactgctaaaacgctgatttgctgttgtttcaccgcagccctgaaggacgtgccatcaagcgccgttgctctgtaccctgcccttttcgctgacgcagagctgtgtgcaacataacaaactggtaacgtatgcaggcgcgggccgaaagcaaatccaccacccggcagtcttaagcaataaaggcgctaaggagaccataaatgtctgatgctaaagcaaaaatcaccctgggtggtgacactgctattgaactggatgtgctaaaaggcacgctcggtcaggatgttattgatattcgtagtcttggttcaaaaggcgtatttacctttgacccaggtttcacatcaacggcttcttgtgaatctaaaattacgtttatcgatggtgacgaggggatcctgctgcaccgcggcttcccgatcgaccagttagcgaccgaatctaattatcttgaagtctgttatatcctgctgtacggcgaaaagccgacccaggccgaatatgacgaattcaaaactaccgtcacccgccacaccatgattcatgagcagatcacccgtctgttccacgcgttccgtcgcgattcccacccgatggcggtgatgtgcgggatcaccggcgcgctggcggcgttctatcatgattccctcgacgtgaataacccgcgtcaccgcgagattgccgcctaccgtttgctgtccaaaatgccaaccatggcagccatgtgttacaagtattcaatcggccagccgtttgtttatccgcgcaacgacctctcctacgccggcaacttcctgcgcatgatgtttgcaacaccgtgcgaagagtatgaagtcaatccggtgctggagcgcgcgatggatcgtattctgatcctgcacgccgatcacgagcagaacgcgtcgacctccacggtacgtaccgcagggtcctccggcgctaacccgttcgcctgtatcgctgcgggcatcgcctccctgtggggaccggcacacggtggcgccaacgaagcggcgctgaaaatgctggaagagatcagctccgttgagcacattccggaatttgttcgtcgtgcgaaagacaagaatgactctttccgcctgatgggcttcggccatcgtgtttacaaaaactacgatccgcgtgccaccgtgatgcgtgaaacctgccatgaagtgctgaaagagctgggcaccaaagacgacctgctgcaggtggccatggagctggagcatatcgcgctgaacgacccgtacttcatcgagaagaaactgtatccgaacgtcgacttctactccggtattatcctgaaagcgatgggtattccgtcctccatgtttaccgttatcttcgccatggcgcgtaccgtgggctggattgcgcactggaacgaaatgcacagcgatggtatgaagatcgcccgtccgcgtcagctgtataccggctacgccaaacgcgatttccagtccgacattaagcgttaatctcactgtccggatcataaaaacgcgcctgctggcgcgtttttttatgcctgataacgcgcttcatgctgaaatcgcccgccagccggcttaatgctggcatcctggacaccagtaaaatggccgcgaggagagcgtcgtcttctcaatgattcccccacagcgttcgcacctttccccatcgcgatggaagaccttaaagcgaaacagcgcgccatgatgcttgttgtcatccaccagaccgcgagtacgataggacagccgcgggatatcgagcagcgcgtgcgccagcgcatccagctgactgtcgctcagttcagcggctttacgcttaccgcttaatcccacctgccagagaatttccacccgcagatagtttccgagcccggcaagaaaagcctgatccagcagcaggccggaaaactgacgattgcggaatttggccgacagcagccgcgctttcacctgctccgcggttaacgtcatgtccagcacgtccggtccgacgcgcagcaagaacggatggttggcaacctgctccgccgtgaggatatcaatgtccgacgcgctgtagagcaaaatcgccttgctggcggtctgcagcctgacgcgcagtacgcggttcgattgcggctcaacgccggcatccaccacacgccagacgccgtacagctggttatggctatacagggtcaatccgccggagaagtgggttaacagggccttgccgcgggtggcgatatgggtcacccgctgaccaattagctgagtttgatagggttgcaactgaggaaaggcgaaccaaacgttggttaagggttcgcctttgattgccgcctccagtttatccgccgcacggcggatctccggaccttccggcatactgtcatccttctgttaatgggtggcgccgccgccaattttgacatcgtcatcctgttcaagggcgacggcaatcgccgtttccagcgccgcgcgtaccgtcgcgaccgacatactcgcctcgccggggtgggccgccgcctgttcaggctgataaggaatatggataaaaccgcccttctgcccgctttttccctgcagctgatgcagcaaaccatacatcacgtgattgcagacgaaggtgcccgcggtttgcgacaccgaggccgggatcccctgctggcgcagcgcgctgacgatcgctttgatcggtagcgtactgaagcaggccgcagggccattagcgacgatcggctcgtcgatcggttgctggcctttattgtcggggatccgcgcatcatcgacattgatcgctacacgttcgacggtgatatcgacacggccgccggcctgtccgacggcaatcgtcagccgcggttgataggtttccagcgccgccttcagcaccgtcagcgcttcgccgaatacgcagggtaactgtttagccaccacctgctgtccgcgaataatcatgccatccagctgcttaaccacttcccatgaaggattaaccgtttcgccgccgaacggctcaaaaccggtaatcaatacgccagccatcatccctccttacaggaacatcaggaaatagagtaagaatacattgacgataagcaacaggataccggtcggtatctgggctttaatcaccgcgtttttatccggcagttccagcagcgccgccgggacaatattgaagttcgccgccatcggcgtcatcagcgtgccgcagtagccggaaaacataccaatcgccgccattaccgccggattgccgccgtgctgcaggactaaaatcggaatgccaactccggcggtcacaatcgggaaagcggcaaaggcgttgcccatcaccattgtcagcaccgccatgccgatggcatacacagccacggcgataaagcggttatcgaccgccagatagtgctcggtcagccatgaaatgctggttccgacgcccgctgcggtaaacagcagccccagcaccgcgaggatttgcggcaggataaaggcccagccgacggaatcaagcaaacggcgcgcttcctgcattggctgcgccaccgtttcatgcgtcatacgaatcgccatcgccaggccaatcagcgtaccgacagtcatcgagaacagagtaatcagcgtcgcgtggttgcccggtccgaagagcgccacctgccatgagggcagattgttaaacagcagtacgccaatgacggtgacgaccggaatcgccagcgccggaaagaaaagtttgttgccgaggcgtttcgcgctggcggttttctcttcctgggtacgctgatggtagctgccgaggcgcacgccgccaaaaccggcgatcagcgccaggacgaccaccaccccgccgacagcgatattcaccgtacgcttatcgcccaccagttgatatgtccagtcgccgagcaagaacaccagcccgtacaggccccagaacagaccggttgtcagacgccgcggattgcttttgtcgcgccaggacatgatagccacgaccagcagtaccgcgccggccagccagtataaataggtttgctggaaattcatgccgcaccgcctttcgcctgtccggcgtttatccggtccagctcgcgctggagatggcgatcgagtcgccacaggcgcgcggcgtggatcagaaaggcgcagatcgccgtcgggatcccccacagggcaatatgcaacggttctgtctggatcccacccgactccagcataaagttgtgcatgaagatgatcgcgccgaaggcgacaaaaatatcttcgccgaagaacagcccgacgttatcggttgccgccgacatcgcgcgcaggcggtagcgtacattgcccggcagcgggccaaagcgcttttccgccgccccctccgccatcggcgccagcagcgggcgcaccatttgcggatgtccgccgaggctggtcaaccccagagcggcggtggcttcgcgcacaaacagatagacgatcagcagacgtccggcggtcgcgctatggatcttcgcgatccacgcctgcgcccgctctttcagaccatggcgctccagcagcccgatcaccgccagcggcagcagcagaataaacggcagattacgggtattcaggaagccttcgcccagtttctccagaatagtggctattggcatatgcgccgccacgccggtgacgatcccggagataatcaccaccagcaccgggttaaagcgtaatacaaaaccgaccacaatcacggcaatgccgattagcggccagagggatatcgcctcttgcataataacgtcctgttcagttgtgagtattgtgagtgttgttaattatttgatttaattattattaataacttaggcggactattactcgaggtccgcgctgacgtcgatattccgcccggcaaacgcggcgcgcaagcgccgggcgaaatcgagcgcgtgagcgccatcgccatgcaggcagaccgtttccgccttaacatgcgcccattcgccgctcaggctgcgcacccgattgtgctgcaccatttccagcgtttgcgccagcgcctgctcttcgctctcaatcagcgcgcccggttggctgcgcggcaccaggctgccgtcggcctgatagccgcgatcggcgaagacttcctggcgcgtcgtcaactgataatgctgtccggcgcggataagctcgctgcccgccagcccaaccagcaccaggtcggcgtcggcatcgcgcaccgcacgggcgatagcgtcggccaaaggcggctctttcgccgcctggttgtacaacatgccatgcggtttgacgtgccgcagctcgcccccatgggcgtgtacgattgccgccagcgcgccaatttggtacagcacctgggcgtagaccgtctctggcggtaactgcatcgcggttcgaccgaaattttcccggtccgggaagctcgggtgtgcgccaatagcgacgccgtttttcagcgcctcgcgcacgcattgctgcatgagaaccgcatcgccggcgtgaaagccgcaggcgatattggcggaagagaccagctgcagcagcgcgctatcgctggcgcagccttcgccgaggtcggcatttaaatcaattttcatcgcttaatctccaggccagttgttcaaggtagcgctgctggtcggcgcgcgcttttagcgcttcctccagcgaacaggggacgaaatggatcggctgacctagcggaatttgcgccagttggtacatatcggcttcaataatgcaggctatacgcggatagccgccggtggtttgcgcatcgttcatcaacacaatcggctggccgttatgcggtacctgtaccacgccgggcagcaggccatgagagagcatttcccggtcggttgtgcgcctgagcggctgcccctgcaggcggtagcccatacggttgctctgcggactcagcttccacggcgagcgccagaaagactcctgcgacacgctgtcgaattcgtgatactccggccccggcagcgcgcgaataatattgcctatcggcagctgtttaacgccgcgcgaggcgctaaagcggcgggacgatttcccaatcttcacttgatcgccatcctgcaaccggcgcccttcgattccgccgataccgactttcagatcggtagagcgggaacctaaaacttcagggacatcaataccgcccgcgaccgccagatagctgcggatcccatgctgaggatttttcagcaccagccgctgcccggccttcgcctccattcgccagcccaaccagaccggcgcgccgtcgagcgtcgcttcacaggcggcgccggtcaacgcgaaccagcagtggcgggtaaactgcacatcgacctgacccagcgtaatttccagcgccgccgcctccggcgcattgcccaccagcagattggcaatggtcatcgccggtttatccagcgcgccgcagcggctaatcccccactggcgctggccttcccggccgccatcctgtaccgaggtatacatgccggcgcggataaatttcaacataccccctccttctgcggcacaaagcgcacgcgatcgccggaacgcagcagcaccggctcttcacgttttggatcgaataatgccagcggcgtgcgccccagcagctgccagccgcccggcgtcgccagcggataaataccggtttgcgatccgccgataccgacggatcccgccggtaccagtacgcgcggctcggcgcgacgtggcatcgccagctgctccggcaggccgccaaaatacggaaaccccggctggaaacccagaaaccacaccatatactccaccgaagagtgcagttcgaccacctgcttttcgctcaaaccgctatggcgcgcgacgtcaccaagatctggccccgcctcgccgccgtagataaccgggatacttatctcacgggattccggctccagcgcatcgctctcttcccaccagcgctgcagcttgtcaatcgcctcccacgccatctcctgcggacgacgcagcacaacggtgatgttgttcatccccgggatcacttcaaccacctcttcgcgatcggtcaaccgctgcgtcaggccccagatacgtttttggctctccagggtcaccggaggctcaagctccaggaccaccgccgtttcacctaacagataacaacgcgctcgctgcactttcttctctcccgtcaggcagggttaggaatatcaataaaggtaacatccagatcggtcgtttccgtcagccattcgctgagggcgcgaatgccgccccgctcggtggcgtggtggccggcggcataaaaatgcaggccctgctcgcgggcagagtgaatagtttgttccgacacttcgccggtgataaaggcgtccacgccaaagcgcgccgcggcgtcgataaagctctggccgccgccggtacaccaggcgacgcggctgacggtgtccggcccggtatcgccgcaccacagcggcttacgccccagtcgcgcttcgatccacgaggccagttcgaggccggaaaccggcatcgacagctcgccccacggcaccagcggttcgatttcgccgagcacgttaatccccagcagatgcgccagctgcgcgttattgcccagctccggatgggcatccagcggcaggtgccaaccgtagagattgatatcgttggccagcagggttttcaggcgacggcgcttcatgccgcggatcactggcgattcgtttttccagaaatagccgtgatgaacaatcaccgcatccgcctgcagacggacggcctcatccagcagcgcctggcaggccgtcactccggtgacgatcttgtgcaccgtttcgcgtccttccacctgcagaccgttaggggcgaagtcactgatggccgcactattgagcttgtcgttaatcagttgttccagttcgctatttttcatcgccactccagcagataatcaggttatacaaaggcataacataaccatatccattcgggtcgtcgatagtccgctaccgtcactgaccatgactttttaacgaatcccgcaatttgtctattcatcccgccgcgcattagtgtatatttatgcactaataaagcatattaaataatcagaaagcccctcaagccatgaatatgactgataaatcgctattcatgcagaacgatcgactttcgctttacgccaggaaacacacttcatatgcagacaacatcatcgcaaccgcgggcgatctactacgtcgtggcgctgcaaatctgggagtactttagcttttacggcatgcgcgccctgctgatcctctatctcaccaatcagctcaaatatgacgataaccatgcctacgccctgttcagcgcctactgttcgctggtctatgtgacgccgatcctcggcggctatctggccgataagctgttaggcaaccggatggcggtcatgctcggcgcgctgctgatggccattggccatctggtgctcggggccagcgaaaccgctccggttttcctgtacctgtcgctggcgatcatcgtctgcggctacgggttgtttaaatccaacgtcagctgtctgctgggcgagctgtacgaacccgccgatccgcgtcgcgatggcggcttttcgctgatgtatgccgccggcaatatcggctcgattatcgcgccgatcgcctgcggctacgtacaggaggagtatagctgggcgatgggctttgccctggcggccatcggcatggtcgcggggctggtgattttcctctgcggcaaccgtcatttccagcataccgctggcgtcaaccgccaggcgctgtgcgcgcgccgcttcctgctgccgaactggggctggctgctggtgttgctggttaccgccccgctgctgattgcggtactgttctggcaggagtggtcggtgtatgccctgatcgtgaccacggccattggcctcgcggtactggcgcggatctacctgcgcgccgaaaccgataaacagcgcaaggatctgcgcctgatcgtcgtcctgaccgccttcagcctgctgttctgggccttcgcccagcagggcgggagctccatcagcctgtatattgaccgcttcgttaaccgccatatcatgagctacgaagtccctaccgctatgttccagtcaatcaacgccttcgcggtgatgctctgcggcatggtgctggcgtggctggtgaaagagagcgtgaacggcaatcgcaccgtgcgcatctgggggaaatttgccctcggtctgggcctgatgagcgccgggttctgcattttgaccctcagcgcccgctggtcggcggcctatggtcagtcgtccatgccgctgatggtgctgggtctggcggtgatgggctttgccgaactgtttatcgacccggtcgcgatgtcgcagatcacccgcattgagatcccgggtgtcactggggtgctgaccggtatctatatgctgctctcaggggccatcgccaactatctggccggcgttatcgccgaccagacctcgcaggcgtcattcgacgccgccggagcggtgaactactccattgacgcctacattaccgtcttcagccagatcacctggggcgcgctggcctgcgtcggcgtggtgctggtcatctggctgtatcattcgctgaaagtcaggacccgccgtctggcggtggagtaattccttttctggcggcctcccaggccgccagcgtctcctgccgcgcctgcttgtgatcaactatcgggcgcgaatagtccagcgtgatcccttgtttatccgcccacgcccacggctgatgcagggccttctccggcacctttgccagctccggcagccagcgacgtataaacaccccctgtttatcaaacttttcgccctgggtggtgggattaaatatgcggaaatagggcgcggcgtcggtgcccgttgaagccgcccactgccagccgccgttattcgctgccaggtcgccatcaatcagctggctcatgaaatagcgctcgcccgcccgccagtcgaggcgcaaatctttggtcaggaagctggcgacaatcatgcgcaaccggttatgcatccagccggtggcgttcagctggcgcatggcggcatcaacaattggaaaaccggtctccccgcgctgccaggcctgtagggcggcctcctctgcgcgccaggcgaccttatctgtccaggcagtaaatggccgccctttacagagcttcggatagtagaccatcagatggcggtaaaactcgcgccagatcagctcgttaagccaggtggcgccggctccgccgtccagcgcggcgggatgttccgtcagcagacgatgcaggcactggcggggggacagcacgccgatggccaggcagggcgacaggcgactggtcccttccacggccgggaagtcgcgctgcccctcgtaatccgccgccgcttgctgacaaaacgcgcgcagacgcgccagcgccgttttttcatccgcggcaaacagcagcccgtcgaacggcgtttgcgggtagttaagctcaggcagcggcggcgcctggcaggcaggcgcctggcgcggcttcggggccgccacgcacgccggcagtccgtcccgcagacggcgaataaacgcatttttaaacggggtgaagactttatacatttcgccgccaccggtcagtacgctgccgggcggcaacaggacgctgtcgtcgaagccctggcaaatcacgtcgcgcaaggtgttctcaacggcggcatcgcgctggcgttcattgaattcgtactgatagttgtagaacaggtgactgacctgatgctgctggcaaaaatcggccagccgttcgacgctggcggtaaaatcgtccgcctcttctacccacagcggtatgccccgttccgccagcgcggcatgcagactctgtaaatggctggcgataaaagcggcctgccgtggcgccaggtgatgttcacgccactgccccggggtggcgatatacagcgccagcacctgcgcctgcggatcgcggcaggcggcagccagcgccaggttatcgtgaatgcgtaaatccgtgcgtaaccagaccagatgggtggccatatcactccttattatccgtcagcaatactcatcttatgatctaagccggcaaaaatagcgcgctccggcaaaatacgcacctgccaattccaaggcggcgcataaaaacgagtgtagacaagcggcgaaaaaaaaccgccggggcaacccggcggtcttgttattttcttcgcagcaggaggattaatagaaatcgtgagcggctttctccgcctgcgccatccacaccggctgctcgctggttttcgaccacacccggtgcagccagctgtaatagcgggcgcgatctttccagaacagcatcaccggcagcgccgcgacgccagccacgacggcgaaagcacgacgcagcaaaataatatgagcaggataagctttgtacaacgccatcatttctctcccctttgtcaggccggcaagcagcgccggtaaaattaatcatgtttgtctgagcaaaataataccgctctgcttgtaattttactactcatccgaccactaaaaagcacgtatttatacttaatttacattcgccacgtaaattagttacgaaaaagttaaattaatactaaccatcagttaatttgtgcctttgtcatttttatactttttttacaccgcacccgcggattattgcgaaatctttgcgccgtaatttctatcctccaggtaaatcgaaaacacacccggaggtggattgtgactgcaggcgtactcactggcgttgggctggtgttcctgttactggcttatctggtttatgccttgatacatgcggaggcattctgatggctgcccagggatttttattattagccagctatctgctggtattgctggtgctggcgcgcccgctggggatgtgtctggcgagaatggtgaacgatatcccgcttcccggcctggccggcgtcgagcgcgtcctgtggcgcgtggccgggatccgcgccgaggagatgggctggctgcagtatttgctggcgatcctgctgtttaacgccctcggcggcctggcgctgtttgccctgctgatgctccagggcgtgctgccgtttaacccgcagcacctgccggggctgtcatgggatctggcgctcaataccgcgatcagctttgtcagcaataccaactggcaggcttacgccggcgaaagcaccatgagttatctcagccagatggtcggcctgacggtgcagaatttcctctccgccgccaccggcattgccgtggtcttcgccctgacccgcgccttcgcccggcagaaaatgtcgaccctcggcaatgcctgggtcgatctgacgcgcattaccctgtggctgctgctgccgctctctctgctggtggccctgttctttattcagcagggcgtgccgcagaatctgcaggcctaccagccctttaccaccctcgaaggggtgcaccagctgctgccgatggggcctgtcgcctcacaggaagcgattaagctgctgggcactaacggcggcggtttcttcaatgccaactccgcccatccgtttgaaaacccgaccgcgctgaccaatctcgtgcagatgctggcgatcttcctgatcccggcggcgctgtgcttcgccttcggcgaggtggtaagcgatcggcgtcagggacgcgccatcctgtgggcaatgacgctgatctttatcctctgcgtcgccgtggtgatgtgggcggagacccgcggcaatccgcatctgctgacgctgggcgccgacagcagcctgaatatggaaggaaaagagagtcgcttcggtattctcgccagcagtctgttcgcggtgatcaccaccgccgcctcctgcggcgcggtcaatgccatgcatgactccttcaccgcgctgggcggcatggtgccgatgtggctgatgcagattggcgaagtggtattcggcggcgtcggctcgggcctgtacggcatgctgctgttcgttatgctggcggtatttatcgccgggctgatggtcggccgcaccccggagtacctcgggaagaaaatcgatgtccgggaaatgaaaatgatcgccctcgccattctggtcaccccgacgctggtgttgctcggcacggcgctggcgatgatgaccgacgccggccgcgccgggatgttcaaccctggaccgcacggctttagcgaagtgctgtacgccgtcacctcggcggccaataacaacggcagcgccttcgctggcctgggcgcggcgacgccgttctggaacctgctgctggcgttctgcatgctggtcggccgcttcgccgtcatcattccggtgatggccatcgccggctcgctggtggcgaagaaaattcaaccggccagccccggcaccctggccactcacgacgccctgtttatcggtttactgatcggcaccgtgctgctggtgggcgccctgacctttattcctgcgctggcgcttggcccgctggctgaacacttttccttactttgagcgatgcggagcaccctgttatgagtcgcaaacaattagccctgctggagccgacgctggtgcgccaggcgctgctggatgccatgaaaaaactcagcccgatggtgcaatggcgcaatccggtgatgtttatcgtctgggtgggcagtctgttaaccaccctgctggcgatcgccatggctggcggcgccctgaccggtagcgccacctttaccgccgccgtcagtatctggctgtggtttaccgtgctgttcgccaactttgccgaagcgatggcggaaggccgcagcaaagcccaggccaacagcctgaaaggggtgaaaaaaacggccttcgcccgcaaactgcgcgccccgcagcatgacgcgccggtcgaccacgtgccggcggaagacctgcgcaaaggcgacgtggtgctggtggaagccggggatattatcccctgcgatggcgaagtcatcgaaggcggcgcctcggtggacgaaagcgccattaccggcgagtctgccccggtgatccgtgaatccggtggcgattttgcctcggtgaccggcgggacacgcattctctccgactggctggtgatccgctgcagcgtgaacccgggagaaaccttcctcgaccggatgatcgccatggtggaaggcgcccagcgccgtaaaacgccgaacgagatcgccctgacgatcctgctgatcgccctgacgctagtgttcctgctggccaccgccaccatctggcccttctcggcgtggagcggcaatgcggtcagcgttaccgtactggtcgccctgctggtgtgcctgatcccgaccaccatcggagggctgctgtcggccatcggcgtcgccgggatgagccgtatgctcggcgccaacgtgatcgccaccagcggccgcgcggtggaagccgctggcgacgtcgatgttctgctgttggataaaaccgggactattactctcggcaaccgccaggcctccgccttcctgccggctcgcggcgtggaagagcgaaccctcgccgacgccgcccagctctcctcgctggcggatgaaacccctgaggggcgcagcatcgtggtgctggcgaaacagcgctttaacctgcgcgaacgcgatctgcagtcgctgcacgccacctttgtcccctttaccgcgcaaacgcggatgagcggcatcaatatcgatcagcgcatgatccgcaaagggtcggtggacgccattcgccgccacgtggaggccaacggcggccacttccctgccgatgtcgataaacaggtggaagaggtcgcccgccagggggccacgccgctggtggtcgccgaaggcgaaaaggtgctggggattattgcgctcaaagatatcgtcaaaggcggcatcaaagaacgtttcgcccagctgcgcaaaatgggcattaaaacggtgatgatcaccggcgataaccgcctgaccgccgcggcgatcgccgccgaggccggcgtcgatgatttcctcgccgaagcgacgccggaagccaagctggcgctgatccgccagtatcaatcggaaggtcggctggtggcgatgaccggcgacggcaccaacgacgcgcccgcgctggctcaggccgacgtggcggtggccatgaactccggcacccaggcggcgaaggaagcgggcaacatggtcgacctggattccaaccccaccaagctgattgaggtggtccatatcggcaaacagatgttaatgacgcgcggttcgctgaccaccttcagtattgccaacgacgtggcgaaatatttcgccattattccggcggcgtttgccgcggtctatcctcagctggccatgctgaacgtgatgggcctgcattcgccctcatcggcgatcctcagcgccgttatcttcaacgcgctgatcatcgtctttctgatcccgctggccctgaaaggcgtcagctatcgcccgctctccgcctcggcgatgctgcgccgcaacctgtggatctacggcctcggcggtctgctggtgccctttatcggtattaaagccatcgacctgctgctgaccctgagcggtctggtgtgaggaacaaactatgtcattgattcgtccggcacttgtgctatttattctgttaacgctgctcaccggcggcgtctatcctctgcttaccaccagcctgggacaatggtggtttaactcacaggccaacggctcgctgatccgcctgaacggtgaagtgcgcggctcggcgctgattggccagaacttcaccgccgcaggctattttcagggccgcccgtcggccaccgcggagacggcggataatcccatggcctctggcggcagcaacctcgccgccagcaacccggcgctggataaagcggtgagcgagcgcgtgcaggccctgcgcgccgccaacccggacgccgacccgcgggtgccggtcgaactggtcaccacctcggcgagcggtctcgataacaacctgactccggccgccgcgctgtggcaggtgccccgggtggctcaagcgcgccagctgagcgttgagcaggtaacccagttggtgaatcaggccacacaaaccccgctgctgagcttccttggccagccggtggtcaatatactgcaactcaatatggcgctggatgccctgaaggataagtaaatgagtgacgagccgctgcgcccggaccctgaccgcctgctgcagcacaccgccgccccgcatcgcggcaaactgaaagtgttctttggcgcctgcgccggggtggggaaaacctgggcgatgctggcggaagcgcagcggctgcgcgcccaggggctggatattctgattggcgtggcggagacccacggccgtaaagagaccgccgcgatgctgcagggcctgagcaccctgccgccgcggcggcttgcccatcgcgggcggtacgtctatgagttcgatctcgacgccgctctagcccgccgtccggcgctgattctggtggatgagctggcgcacagcaatgcgccaggctcccgccatccaaagcgctggcaggatgtggatgaactgctggaggccgggatagatgttttcactaccgttaacgtccagcatctggaaagcctgaatgacgtcgtcagcgggatcaccggcgtgcaggtgcgggagacggttcccgatcccttctttgacgccgcggacgacgtggtgctggtggacctcccccctgacgatctgcgccagcggctcaatgagggcaaagtctacatcggcggccaggccgagcgcgctatcgaaaactttttccgcaagggcaatctgattgcgctgcgcgagctggccctgcgccgcaccgccgaccgcgtcgatgagcagatgcgcgcctggcgcgaccgccagggccaggagaaagtctggcacacccgcgatgcgatcctgctctgtattgggcacaacaccggcagcgaaaagctggtgcgcgccgccgcccggctcgccgcccgcctgggcagcgtctggcatgcggtgtatgtcgagaccccttccctgcaccggctgccggaaggccggcggcgggctattctcgccgcgctgcgtctggcccaggagctgggggccgaaaccgccaccctctccgacccgtcggaagagaaagcggtcctccattacgcccgcgaacataacctcggcaaaatcgtcattggccgccaaagcaagcgccgctggtgggatcgcagcggcttcgccgatcgtctggctcgccatgcgccggacctcgatctggtggtgatcgccctcgatgagaaacccttcccccttgccgcacgcgccagcgacagccgtccggcgctggagaaatggcgcctgcagctgcagggctgcgcggtggcggtggcgctatgcgccatcattaccctggtggccatgcagtggttgatggccttcgaagccgccaacctggtgatgctctatctgctgggggtggtgctcatcgccctggtctatggccgctggccatcggtgctggcgacggtgatcaacgtcatcagcttcgatctcttttttgtcgccccgcgcggaacgctggcggtgtcggatgtccagtatctgctcaccttcggcgtgatgctcaccgtaggcctgcttatcggcaacctcaccgccggcgtacgctaccaggcgcgggtggcgcgctaccgtgaacgccgtacccgccatctgtatgagatgtctaaagcgctggcggtgggtcgcagccagcaggatatcgccaccaccagcgagcgatttatcgcctccacctttcaggcccgcagccagctgctgctcccggacgcccagggaaaactgctgcccttaacccaccagccagggctgaccccgtgggatgatgccatcgcccgctggagctttgataagggccaacctgccggcgccggcaccgataccctgcccggcgtgccgtatcagatcttgcccctgaagagcgccgcccgcacctggggactactggtggtggaaccggagaatctgcgccaattgatgatcccggagcagcagcggctgctggagacctttaccctgctggtggccagcgccctggagcgcctcaccctgaccgccagcgaagagcaggcccgtctgaccagcgagcgggaaagcctgcgtaactcgctgctcgccgccctgtcgcacgatctgcgtactccgctgaccgtgctgtttggccaggcggaaattctgaccctcgatctggccagcgaaggttcaaaacatgccccgcaggccaacgaaatccgccagcatgtgctcaacaccacccggctggtgaacaacctgttggatatggcgcggatccagtccggcggctttaatctgcataaggagtggctgacgctggaggaagtggtcggcagcgcgctgcgcatgctcgagccaagcctcggcggccagcatattcagctagatttacccgatcccctccagctggtgcatgtcgacgggccgctgttcgagcgggtgctgatcaacctgctggaaaatgcccataagtatgccggcgcccgggcgagcatcggcattcgcgccgaggcggacgcccggcagctgtcgctggaggtatgggataacggtcctgggatcccggcaggccaggaacagactatctttgataaattcgcccgcggcaacaaagagtcggcgatccctggcgtcgggctgggccttgccatctgtcaggccatcgtcgacgtccacggcgggaccatctccgccagcaaccggcccgagggcggcgcctcattccgtgttacactgccgggagaaacgccccctgaactggaagagctacctgaggaattgtgattaacgttctgattatcgaagacgaacacgctatccgacgctttctgcgcaccgcgctggaagccgacggcatgcgcgtatttgaagcggaaaccctgcagcgtgggctgattgaagccgccacccgtaagcccgacctcgcgatcctcgatctcggcctgccggatggtgacggcattgattttattcgcgacctgcgtcagtggagccagatgccgattatcgtcctgtcagcgcgtagcgaagagcatgacaaaattgccgccctggatgccggcgccgatgactacttaagtaaaccctttggcatcggcgagctgcaggcccgcctgcgcgtcgcgctgcgtcgccacggcgcggcgcaggccgatgagccggtggtgcgcttcgctgacctggaggtcaatatccccgcccgccgcatcctgcgcggcagcgaagagatccacctgacgcctatcgagtttcgcctgctggcggcgctgttgaataatcccggcaaagtgcttacccagcgccagctgctgaatcaggtgtgggggcctaacgccgtggagcacagccactatctgcggatctatatgggtcatctgcgacaaaagctggaggccgatccggcacggccgcagcatttgctgaccgaaaccgggattggctatcgctttatgccctgaatcccgcctctgcagtaccagaggctggcgattttcagcccttcagagagcagcagaaagcctgccaggatcgctacatgccggacgccggcagcctgaatcagccacaggcccagcaatagcgaaggctgcatgaacagcagcctgagcggcgcctgcccccaggccagccacagcgcatagcggctctggcggaaaaaaaagatcatcgatagcgggatgctgataatcagcagaacattcagcgggtacagccagaccgccgcggagccccaggtgtgcagcagctggagataagccagcagatcgtcgtaaaaagggaggcggcggtgggcaatattccaccataagaattgcaggacgaaaaagagatccatccacgcccagaacaaaaacagagacttccgttgtattttcatcgctatccttgcgaaaaaaatcaggcccgcaaggggcctgatggtagtgcgtcgttaagcgttcttcagcacttcgctgacaatctctaccgcttctttttcaatcagcttgcgatgctcttcgccgaggaagctttcgcagtagatcttgtaggcgtcttcggtgcctgacggacgcgccgcgaaccagccgttgtcggtcatcaccttgaggccgccaatcgccgccccgttgcccggcgccgcggtcagacgggcagtgatcggatcccccgccagggtgtcagcgctgaccatttccggagagagcttggacagcgccgctttctgcgcggaggtcgcggaagcctgcagacggttatagctcggcgcaccgaagcgttccgccagttcgttgtaatgctcctgcgggtttttcccggtcaccgcggtgatttccgccgccagcaggcacatgatgatgccgtctttatcggtggaccacggcgtgccgtcgaagcgcaggaaggaggccccggcgctctcttcgccgccgaagccgaagctgccatcgaacaggccgtcgacaaaccacttaaagcccaccggcacttccaccagcttgcggcccagatcgttcaccacgcggtcaatcatcgcggaggagaccagcgttttacccaccgccacctctttgccccactgcggacgatgctggaacaggtagttgatcgctaccgccaggtagtggttcgggttcatcaaccccgccggggtgacaatcccgtggcggtcgtaatccgggtcgttagcaaacgccagatcgaacttatcgcgcagcgccagcaggccggccatcgcacactctgaggagcaatccatgcggatggcgccgtctttatcgaggtgcataaagcggaaggtctgatccacctgatcgttaacaatggtcagattgagcttgtagtgctcgccaatgcgcttccagtattcgataccggacccgcccagcggatcgacgcccagcgtcaggccggctttctggattgcggccatatcgacgatatccgccagcccctcaatgaacggctgcaccagatcctgttctttaacgtggccagaagccagcgccgcgtccagagaaatgcgtttcacgccctgcaggcccgcggccagcagttcgttggcgcggttttccaccactttggtgacgttggtatcagccgggccgccgtttggcggattgtacttgataccaccatcttccggcgggttgtgtgacggggtgatcacaatgccgtccgccagcggaccgccttttttgttatgcaccagaatcgcgttggagaccgccggcgtcggggtgaagccgttgttttcctgcacgatcacgtcgacgccgttggcggttaacacttccagcaccgaaataaacgccggctcggagagggcgtgggtatctttgccgacatagcacggaccggtgatcccgtttttcgcacgatcttccgcaatggcctgggcgatggccaggatatgcggttcgttgaagttgtggcgcgccgcgctaccgcgatggccagaggtgccgaattttaccgcatgctccgcattaccgacttcaggcttcagcacgtagtactgagcagtcagttgggcgacgttaatcaaatcactctgttgcgcaggctgccccgcacgtttatcgattgccattgcctgatccttctggtgcaaatgttaaaaagctagatcgtgccgcaaaccttttcaatcagctccgcagggaactgcatcgactgcatgatgtgctcaatcatgctgcatttacggccggtattggtattggtgatcacccaccacggtgtaccaggaacctgtttcggtttggtctgattaccgcttttcagcagcgtacgcgcatcttccgcgaagtaaacgcgcgtgcggccgtgcagagactcggtggcctcggcaaatgctttactgtccagggagtagagggtcgtcaacaccagcataaaacggttcaccgcgcgcttctgctcggcgtattcatcagataacagcatctcgcgcatggcgcggactttatctttcaccgggttagcgggtttcacctcagcgacaggcgctggcgccagcgtcggcgcggctttgctgaccggtgtagccggttgggaaacggcggaaaatttcagcatacgccgtaaaatgtcggatgcgctctcgccgatatgcagagtgtggctggcaatatagcgatagagttcatcatcaacttcaattgttttcatcttaatccagtgcgatatcttttctgaatacaaatcgttgggattataagtacaaatcccaaccgcggatagcgtcaaaccaggatggcggtaaaactcagaaaacttctgggtcttgcagccggatggcagaatgtccaacataataccctaacccgacggagcgaaaaaaagaactttgccatgaaattaaatagccgagcgcaatctgcacagaatccgcacaaccactccccgatcgtgctggtccacggtctgtttggcagcctggacaacctgggcatcctcgcccgcgacctgatcgccgaccacgatattgtgcaggtcgatatgcgcaaccacggtttgtcgccgcggtcgccagagatgacctaccccgccatggcgcaggatctgcttgatacgctcgacgcgcaccagatcgagcgcgccacctttatcggccattcgatgggcgggaaagcggtaatggcgcttaccgccctggcgcctgaacgcatcagcggtctggtggcgatcgatatcgcgccggtggattatcacgttcgccgccatgatgagattttcgccgctatccgcgccgtcagcgaatccgccgccagcacccgccagcaggcggcgcaggtgatgcgcgagcacctgcaggaagaaggcgtgattcagttcctgctgaaatcattcgtcgacggcgactggcgcttcaacgtgccggtgctgtgggaccagtatccgcatatcgtcggctgggaaaccatcccggcctggccgcacccgacgcagtttattcccggcggcaactcgccctatgtgaccgacgcctaccgcgacgcgctgctggcccagttcccgcaggcccgggcccacgtcatcgccggcgccggacactgggtccatgccgagaaacccgaggcggtgttacgcgccatccgccgctatctgacgagcatcgccgcctgattggctaaaatatgcccgaccgcgccgcagaatgcccgcggtcgttggcgcagccgttcgcctgatgtatgatggcgcgctatctgcgccggctagagcccggcagcttgtttccccgaagtcactcagaatcatggcaaaagaacaaacggaccgtacgacattagatttgttcgcaaacgagcgtcgcccgggaagaccgaaaaccaatccgctgtcgcgcgatgaacaactgcgcatcaacaaacgtaaccagctgaaacgcgatagggttcgcgggctgaagcgcgtggagttaaaactcaacgccgatgcggtcgatgcgctcaacgagctggcggaagcgcgtaatatgagccgcagcgatctcattgaagagatgctgatgacccagttaaccgccctgcgcagccagggaaaagtctaactttccgcgaaaaacccgcattcatgtagcagagtgtgcagtcgggcgtgattgctgtttccgcgcccttgcctgttctgctatgattgccgttatctatgggcattgcgtccctaccacatcatttaagtttcaagaggttattttactcatggcaatcatcggcatcttttttggcagcgacaccggcaacaccgaaaatattgcaaaaatgattcaaaagcagcttggtaaagatgttgctgatgttcacgacattgccaaaagcagcaaagaagacctggaagcccacgacatcctgctgctcggtatcccgacctggtactacggtgaagcgcagtgtgactgggatgacttcttcccgacgctggaagagatcgacttcaatggcaaactggtggcgctgttcggctgcggcgaccaggaagattacgcagaatacttctgcgacgcgctgggcaccatccgcgacatcattgagccgcgcggcgcgaccatcgtcggtcactggccaacggcggggtatcattttgaggcttccaaaggcctggcggatgacgaccacttcgtcggcctcgccattgatgaagaccgccagccggagctgaccaacgagcgcgttgagaaatgggtgaagcaggttgccgaagagctgcacctcgaagaaatcaaaaacgcctgatgattaagcggcgcaatcattgagttgcgccgcattaatagacaaaagcaatcaaactaatagctacaagtttttaacttttaatcacatatctgtacaatgtcctctgattctacgaggcacgtgacgcagtttgtagctggtgcctcgtttttgacagcaaaccaggcccgatgcttgcagttttcatttaccagtggcagttctataatgagacgcattacgtcgggttaatttctgtatgacttccgttgaaggaagtagatcgtttagcaacaggacagattccgcatgactgacaacaataccgcattaaagaaggctggcctgaaagtcacacttcctagactaaaaatccttgaagtgctgcaggaaccggataaccatcatgtcagtgcggaagacttatataaacgcctgatcgacatgggcgaagagatcggtctggcgaccgtttaccgcgtcctcaaccagtttgatgacgccggcatcgtgactcgtcataatttcgaaggcggaaaatccgttttcgaactgacccagcagcatcaccacgatcacctgatctgcctcgactgcggcaaagtgatcgaattcagcgacgactcgatcgaattacgccagcgtgaaattgcctcccgccacggcatccgcctgaccaaccacagtctgtatctgtacggtcactgtgcggaaggggattgccgcgaggacgaacacgcccacgacgcggtggaaaaataattccccgtttcgctgagactgaaaagccaacctgccggttggcttttttatgggcgcctctggcgcccttcccgcacacgcccctggggtgactttcctcatccccgctttgtccggagagttgatatggaacttcgccagcggggcgatctctgatcggatcggtcgtagtccggtgctgatgggcattaccgtgctggcgctgctcaccacctggcgggtgatgcactggctcaccgtcgcgcccgatttcacccgtatgacgctggtcctgctatggttctcgttcttcttggacatgtataacggcgcgatggtcgcggcgcttaccgaagtgatgccggtacacgtccgcaccgtgggcttttcgctggcctttagtctcgctactgccattttcggcgacctgacgccagctatttccaccgccctggtcgagctcaccggcgataaaagcccgccgggctggtggctaatgtgcgccgcgctgtgcggattcattgccaccgcgctactgttcgtgcggctgagccgcggctatcagccggcggagagtcagcgcaaaaaaaacaaacgggcggagatatgccccgcccgtttgccgctgtcgtctgatttaatgggtcgtattattgctgcggatctccttccagatctgatcgcagcgcgctttcaccgcctgatcgttgccggtgcgggtggcctgaatacactgttggtaatccaggacgcgaacgctctcctggttggcgaactgctggtgctgtttatcctttttcagcacattcagtacgctctggcaggcttcaatcttgtccggattcccttccgccgtattaatacaggcgctataggcatctttcagtttggtgtcttctttcggcgccggcgacgtggtgcaggccaccaggcccgctgccatcatggcaataagcagcatttttttcattgtcgttctcccagaggtgcggcaggctcacgcccgccgcgcaggcatcagaaaatagtgaacggggcgataaccatgaacttcacgtcgcgctcatcctggaagatgttgccgtagccgccgctccagctcggaatatcggaatggttgtcgtattgggtaaagtgcagtttgaacagggtgcccttcgcccgcccttcctgtacggtatacattgcatccaggctataggccgactctttcaggcgatagtcagggtcatagtacgcatccggagaggacattcggcccggcttcgcatcccaggcgtagacataagacgcgccgaacgcccagcccggcatatcccagtttttcatgtcatacatcgcgccaaagaagaccgctttttcgccgttggcgttaaagtcggagcggttatcccaccagatatcgagacgaccattggaagaggcgtaggtcggggtcatacgctgcaggaagtagccctgctggccatcagccttcacccaggttccctcgagacgcagatccaggacatccgccaccttataaccaaaggttaacgcctgcagccatgcggtgccatcatagatgtcgttgaccccgccgttgctgaccttatcgcgggtgccgtagaactggtagctggtgctcagcggcgcgccggcgacgtcaaacttgtagctggctttagcaaagtactgatcgatatagccctgagcctgaccaaatgccgcctccagcaccaggtcatttttgaaatcatatttagcgccgacggagtggagataatcgactttggtcttcttatcgttctgatagaaatcgtccatctcgatatgccatggcgctttatactcgttcgtccacatataggagaaacttaacgcgcccgccgtgccatagtcgaagttagccccggcctccgccccctgataggtacctggcataaaactccagtgcggagccagcagagtctggccggttggctggatatagcccgcacgtgcccacgccggaccatatttgaatttcgctgcggctttatacaggctgatgccgctcttatcgccggaatagtcttcgtcataggctttgttacgtgacgagaaggcaatttcgttcgggtgaccgctatcgccgttctccgccatttcaatcgcggtaaacgcggcaatatcaaggccaaacatatcggcggcatagccggactggaagtccaggttggcgttccaggtggagtgggaaaggttggttttgtatttgtcgccgtcggtcacatctttacggtcacgctcacgctgccagtaatagataccgccggttaaggttgaatcatcgataaagcctgctgcgctggcctgtggagccacaacccagcccgacatcgcggtgacggcggcaatagccagcgccagcgtactacgtttgccactaaacgtacgcatgtgcatatcctctttgacgttttaaaaggcgaagaccagcggtcaatcgctaaaaaataaataaaactgcaaaatgtggggcggtaaaaaagaccgcgaaaccactgtagatagactatttttcgtggcgcgaattatcaatgtttttcgtgaggcaaagcttaagattatgacaaagcgcacatattttatgtcgttttgttacagtcttatctctgatgattttgttatggaagtcattgcaaaatcagggaaaaacgcaatcattgaaagcgattacattggttttttgtatgtgacaggaaacatcagaagcgctatttattaccgcgcagaaacagaattaattcgcatcgcgaaaatgaaaagtttaattagctgattctgaaacaaaaaaagcgccgctgggagcgacgctttgacagaaaagaaatgttattcgcccgctttcgcccaggtatcacgcagcccgacggtgcggttgaacaccagattggttgcggttgcatagcggctgtcgaggcagaaatagccttcacgctcaaactggtaagctttaccggcttcggcctgcgccaggctcggctccgcgtacccctgtttgatcaccagcgattccgggttgatcactgcgaggaaatcgtccgccgcgcccgggtttggcacgctgaacagacgatcgtagagacggatctctaccggcagcgcatgcgccgcgcttacccaatggatcacgcctttgaccttgcggccatcggccggatctttgctcagggtgtcggcatcgtaggtgcagaagatggtggtaatattgccttcggcatctttctccacgcgttccgctttgatgacgtaggcgttgcgcagacgcacttctttacccagcaccaaacgcttgtactgtttgttggcttcttcgcggaagtccgcgcgatcgatccagatttcggcgctgaacggcacttcacgactgcccatttccggcttgttcggatggttcggcatcaccaccatttcgctttcgccctgcggatagttctcgataaccagtttcaccggatcgatcaccgccatcgcgcgcggggcgttttcgttcagatcttcacgaatgcaggactccagcgacgccatctcgatggtgttgtcctgcttggtcacgccgatgcgcttgcagaactcgcggatggattcggcggtgtagccgcgacgacgcagaccggagatggtcggcatacgcgggtcgtcccagccttccacgtgcttctcagtcaccagctggttcagcttacgcttggacatcacggtgtattcgagattcaggcgcgagaattcgtactgacgcggatgcaccgggatgctgatgttgtctagcacccaatcgtacaggcggcggttgtcctggaactccagggtacacagcgagtgggtaatgccttccagcgcatcgctgatgcagtgggtgaagtcgtacatcgggtagatgcaccacttgttgccagtctgatgatgctcagcgaacttaatgcggtacagcaccggatcgcgcatcacgataaacggcgacgccatatcgatcttcgcgcgcaggcaggctttgccctcttcgaagccgccgctgcgcattttttcaaacagcgccaggttctcttccacgctgcggtcgcgatacgggctgtttttacccggcgctttcagggtgccgcggtattcgcgaatttcatcaggagagagttcatcaacataggccagacctttgttgatcagctcaaccgcatactgatgcagctgatcgaaataatcagacgagtagcatacgtccccggaccagtggaaacctaaccactgcacgtcgtttttaatcgactcaacgtattcgatatcttctttcaccgggttggtgtcatcgaaacgcaggttgcattggccctgataatcctgggcgatgccgaagttcaggcagatggattttgcatggccaatgtgcagataaccgttcggctccggcgggaagcgagtgtgaacggtggtatgtttaccggtagccagatcttcatcaataatctgacggataaagttagtcgggcgggcttctgcctcactcatcacgggttcctcaaagcgtaaacaacgtataacggcacatgatcttacaagcagggcgtagtgacaactattagttacgtaaaataggtatcagaagaggattatggggccgattgctggaaaaaaaagcggcgaaggtttcccttcgccgctgaggcaaaaactcgactcaggagccttacttgcctttaatctcatacagcggcgtctggccagcaacgaccttaccgctcgccagtatcaccagcgcgctgtagtcatcgctgttgctgcagacgaccggactgatcattgagcgcgcgttggcgttgaggaagtccagatccatttccagaatcggctcacccgccttcacgtccgtgccctcttcaaccagacgtttgaagcccttgccttccagcgccacggtgtcgatacccatgtgaacgacgatttccgcaccgttgttggtttcgaggcagaacgcgtggttagtgttgaaaattttcaccacggtaccggcggccggggccaccacgatgttgctggtcggtttcaccgcgatcccgtcgccaacggctttgctggcgaaggcttcgtccggcacctgctcgagggccaccacgtcaccggtaatcggcgaaaccagcgactcaacggtcttcgcgttcgctaccgcctgcggtttagccgcgggcgctgcggtggcgacgttgccagccggtgcggctgccgctgccgctaccgggccgcgggtaaccacttttttcatctcatcgccgatagactctgctttcgcaccgacgataacctggatggtttgcttattcagtttcaccaccccggacgcgccgagacgtttacaggcggcgtcgttcaccttcgccgaatcgcccacggtcagacgcagacgggtgatacaggcgtcaatggctttcaggttgtccgttccgcccaccgcggcgatatagctggtcgccagttgggtcagcccctcttcagtgttgctgttggcttcttccgttaccacgtcagcggctttgtcttcacgacccggcgttttcaggttgaacatgcggatcaccgcgctgaacagcaggaagtagacgaagaagaacaccacgcccatcaccagcagcatccagacgtttttgctggcggccggcaggctgtacatcagcacgtagtcaattgcacctgcggagaaggagaagcccgcatggatcccgagcgccgttgcgatgaacaggctgataccggtcagcaccgcatgcaggaggtacagcagcggagccaggaacatgaacaggaattccagcggctcggttaccccggtcaggaacgcggtgatggccacggacagcagcataccgcctaccatcggacgacgcgctttcggcgccgccagatacatcgccagcgccgcacccggcagaccaaacatcatgattgggaagaagccggacatgaacatccccgcggtgccgtcgccggcgtagaagcggttgatgtcgccgtggaacacagcgccagcggcgttagtgaactcaccaatctggaaccaggcgatggtgttcagcacctgatgcagaccggttgggatcagcagacggttgatgaaaccaaagataccggaacccagcgcccctgcggagacgatccattcgccgccagagtggatagcgtgctgcaccggcggccagacgtagccgaagatcgccgcgaggatcagacagaagaagccggtggcgatcggcacgaagcgtttgccgccgaagaagctcaggaagtccggcagcttgatgccggcccagcggttgtataccgcccctgccaccagaccggtaatgataccggccagcacgcccatattgatttccgggttgatggtgaccatcgctttggtcatcacgaaataccctaccgcaccggccagcgccgcagaaccggcgttatccttggaccagcttgatgccacaccaattgcgaagatcagcgccagattatcgaagatcgccccacccgcttgcgcgatgaagggtacattcaacaggtctggttgcccgaaacgcagcagcaatgccgcgaccggcagcactgcgatagggagctgcaacgccctacccagtcgctgaaagaaacctaaaatattcatcttattccccctatgagaccccgatgaggctcatttcaaagccacttttttattgtgtaacaaggtcggttttatcacttaccggcaaagtgtgtgaaaaattaattcgtatcgcaaattaaacgggtattttttgtgataattatcaccaaatatcgtattccctcctcccttgcactggctaacaacgaaaacttattttatcattcaaaaaatcaacacggattgaccccggtcggcgcagttgctgcaatactctccttagagtgctggcgccaatccgccagaatctactttgactatagaggtgaagaatgagactgattcccctggtaaccgctgagcaggtcggtaaatgggctgcccgccatatcgttaaccgcattaatgcatttaaaccaaccgcggaccgtccgttcgtcctgggtctgccaaccggtggtaccccgctgaccgcctacaaggcgctggttgaaatgcataaagcaggccaggttagcttcaagcacgtcgtcacctttaacatggatgaatacgttggcctaccgaaagagcatccggaaagctatcatagctttatgcaccgtaatttctttgaccacgttgatattccggcagaaaatatcaacctgctgaatggtaacgcgccggacatcgatgcggaatgccgtcgctatgaagaaaaaattcgttcctacggtaaaatccacctgttcatgggcggcgtgggcaacgatggtcatatcgcgtttaacgaaccggcctcttctctggcgtcccgcacccgtattaagaccctgacccatgaaacccgcgtagcgaactcccgcttcttcgacggcgatgtggatctggtgccgaaatatgcgctgaccgtcggcgtgggcaccctgctggacgcagaagaagtgatgattctggtgctgggtcatcagaaagcgctggcgctgcaggcggcggtagaaggtaacgtcaaccacatgtggaccattacctgtctgcagctgcatccgaaggcggtgatcgtctgcgacgaaccgtccaccatggagctgaaagtgaagacgctgaaatatttcaacgaattagaagctgaaaatattaaaggtctgtaatgtagtccttcccgcgccctggcgcgggatcatctttttctttgtacgcaccatcatgccggcggcaaacgaacgaacgctgacctgatgaggcgtatataccgggggtcgtaatgtatgcattaacccagggccgggtttataccggtcatgaaattctcgatgaccatgcggttgttatcgctaatggctttatcgaacgtctttgtccgctggcagatttgccgtctgacatcgagcagcgctcagtcaacggcgcaataatcgcccccggttttatcgacgtccagctcaacggctgcggcggcgtgcagtttaacgacagcccagaggcggtcactgtcgaaacgctggagatcatgcagaaggccaacgaacgctcaggctgcaccagcttcctgccgacgctgattacctccagcgacgatctgatgaagcaaggcgtgcgcgtgatgcgcgaatatctgcaaaaacatccgaaccaggcgctgggcctgcatctcgaagggccgtggctgaatatcgttaagaaaggcacccacaatccggactacgtgcgtaaaccggacgcggcgctggtcgatttcctgtgcgacaacgccgatgtgatcaccaaagtgaccctcgcccctgagcgcgttgagccagaagtgatccgcaaactggtcgccgccgggatcgttgtctccgcgggccactccaacgctacgctgaaagaggcgaaagtcggcttccgcgcgggcattacctttgccacccacctgtataatgcgatgccgtacattaccggccgcgaaccgggtcttgccggggcgatttttgacgagccggatgtctactgcggtatcatcgtcgacgggatgcacgtcgattacgccaacgtgcgcaacgccaagcgcctgaaaggcgacaagctgtgcctggtcaccgacgccaccgcgccggcgggggcgaatattgaccagttcatttttgccgggaaaacaatatactaccgcaatgggctgtgcgtagatgaaaacggcaccctcagcggatcttccctgaccatgattgaaggggtgcgtaatctggttgagcattgcggcgtggcactggacgaagtattgcgcatggcgacgctctatcctgcgcgcgctatcggcgtggacaagcagctcggcagcattgcgccgggcatggtcgctaacctgaccgcctttacacgcgattataaaatcaccaagaccatcgttaatggtaacgaggtcgtcactgagtaagtaaaagtatgacagcaggcggacaagctcaaattggtaacgttgacctcgtaaaacaactgaacagcgcggccgtgtaccgcctgattgaccagcatgggcccatctcgcgcattcagatagccgaacaaagccagcttgcccctgccagcgtgaccaaaatcacgcgtcagcttattgagcgcggcctgatcaaagaagtcgatcagcaggcctccaccggtggccgccgcgctatctctatcatcgcagaaactcgcaacttcaacgccatcggcgtgcggcttggccgctatgacgccactctgaccctgtatgatttaagcagcaagaccctggaagaggagcacttcccgctgcccgagcgcacccaggaaacgctggaacacgccctgctgaatatcatcgccacctttatcgaaaactgtcagcgcaaaattcgcgagctgatcgctatctcagtgatcctgccgggcctcgtcgacccggaaagcggcgtgatccgctatatgccgcacattgcggtggaaaactggggcctggtcggggcgctggagaaacgcttcaatgttacctgctttgttggccacgatatccgcagcctggcgctggccgagcactattttggcgcaagccaggattgcgaagactccattctggtgcgcgtgcaccgcggtaccggggcggggattatctccaacgggcgcatttttatcggccgcaacggcaacgtcggcgaaattggccatattcaggtcgacccgctgggcgaacgctgccactgcggcaacttcggctgtctggagaccgtcgcggccaatgccgccattgaacagcgggttcgccacctgctggagcaggactaccagagccgtctgacgccggatgactgcacgatcaaaactatctgcaaagcggccaacaagggcgatgccctggcctgcgaggtgattgagtacgtggggcgccacctcgggaaaacgatcgccatcgccattaacctgttcaacccacaaaaaatcgtcgtcgccggcgaaatagtggaagctgaaaaggtccttcttccggccatcgaaggctgcattaacgcccaggcgcttaaggcgtttcgtaagaacctgccggtggtgcgctccaccctcgatcaccgctctgcaatcggcgccttcgcgctggtcaaacgcgccatgcttaatggcacgctgctgcagcgtttgcttgagagctaatcgccccttttctgatagcgcgtcaccttgatacggacgggcctcgcccgtcagaggtgtgaaacctcatcgatgacgcgtatagtttcgtctttgttaatgattctggacccaccatgaccattcaaaacataatttgtgatattgacggcgtactgatgcacgataacgtcgccgttcccggcgcagccgagtttatcaagcgcatcctcgataaaggcatgccgctggtaatgctgaccaactacccgtcgcaaaccggccaggatctggcgaaccgtttcgccaccgctggaattgatgttccggatagcgccttttacacctcagcaatggccaccgccgattttctgcgtcgccaggaaggcaaaaaagcctacgtggtgggagaaggggcgctgatccacgagctgtacaaagccggctttaccattaccgatgtgaacccggattttgtcatcgtcggggaaactcgctcctttaactgggaaatgatgcataaggccgccttcttcgtcgccaacggcgcccgcttcattgccactaacccggatacgcacggtcgcggcttctaccctgcctgcggcgcgctgtgcgccgggatcgagaagatctccggccgtaagccgttttacgtcggcaaacccagcccgtggatcatccgttcagcactgaataaaatgcaagctcactccgagcagacggtgatcgtcggcgataacctgcgcaccgatatactggccggtttccaggcggggctggagactattctggtgctctccggcgtctccaccctcgacgatatcgacagcatgccgttccgcccgtcgtggatttacccttccgtcgcggaaatcgatattttctgatgccaaccacgtcgcaggacgtggtttttcatttctagcgcccttcagaattaccccatctaataaaaacggcttataaatacgaattcctcaataaagccgttcaaaagatactcttttttcactgttcaacaatcacggttgcgttttttctttttccggccgcaaaacccttgcgcctgctccccctttacggcattttcttaagcacgcactcaggcttcgccacgagacgaagccagcacaacatcaaacacgacagggtaatggagaaggctatgtgttctatttttggcgtactggatattaaaactgacgcaggcgagctgcgtaaaaaggcgctggagctttcccgcctgatgcgccaccgcggtccggactggtctggcgtatatgccagcgacaaagcgattctggcgcacgagcgcctgtcgattgtcgacgtcaacgccggggcccagccgctgtacaacgccgaaaaaacccatgcgctggccgttaacggcgagatctacaaccaccaggcgctgcgcgcggagtatggcgatcgctaccagttccagaccggttccgactgcgaagtgatcctcgcgctgtatcaggaaaaaggcccggagttcctcgacgacctgcagggaatgttcgccttcgccctgtacgacagcgaaaaagacgcgtacttaattggccgcgaccatatcggcattatcccgctgtatatgggccatgacgaacacggcaacttctatgtcgcctccgaaatgaaagcgctagtgccggtatgccgcaccattaaagagttcccggcgggcagctacctgtggagcaaagacggcgaaattcgccagtactatcagcgcgactggtttgattacgacgcggtgaaagacaacgttaccgataagaacgagctgcgccaggcgctggaagagtcggtgaaaagccacctgatgtccgacgtgccttacggcgtgctgctctccggcggtcttgattcatcggtcatctcggctatcaccaagaaattcgccgcccgtcgcgtcgaagatcaggagcgtagcgaagcctggtggccgcagctgcactctttcgcggtcggtctggaaggctctcctgacctgaaagcggcgcaggaggtggccaaccacctcggcaccgtgcaccacgaaattcactttaccgtccaggaagggctggatgccatccgcgacgttatctatcacatcgaaacctacgatgtgaccactattcgcgcctcgacgccgatgtacctgatgtcgcggaaaattaaagccatgggcatcaaaatggtgctttccggcgaaggttcggacgaagtgttcggcggctacctctacttccataaggcgccgaacgccaaagaactgcacgaagagacggtgcgtaagctgcaggcgctgcatatgtttgactgcgcccgcgccaacaaagcgatgtccgcctggggcgtggaggcccgcgtgccgttcctcgacaagaagttcctcgacgtcgcgatgcgcattaacccgcaggataagatgtgcggcaacggcaaaatggaaaaacacattctgcgcgaatgctttgaatcctacctgccggccagcgtcgcctggcgccagaaggagcagttctctgacggcgtcggctacagctggatcgataccctgaaagaagtggccgccaaacagatcagcgaccagcaactggaaaccgcaagcttccgcttcccgtacaacacgccgacctccaaagaaggctatctgtaccgcgagatcttcgaagagctgttcccgctgccgagcgcggcggagtgcgtccctggcggtccgtcggtggcctgctcttcagcgaaagccattgagtgggatgaagcgttcaaaaccatgaacgatccatcaggccgcgcggtcggtgtccaccagtcggcctacaaataagcccagacgggcggtgaaacgcaaaacggaccctccggggtccgttttctttttgccggatttataccgctgaaaaacgataaataaccaataattgccgaatattccagcgagctgttcgcaacctaaccaaacagtcacattacaacgattttccttgaaaaagaggttgacgctcgcaggcccaatacgcataatgcgccccgcaacgccgataaggttacgcgaaaaaaagatggctacgtagctcagctggttagagcacatcactcataatgatggggtcacaggttcgaatcccgtcgtagccaccatcttttttgcgggagtggcgaaattggtagacgcaccagatttaggttctggcgccgcaaggtgtgcgagttcaagtctcgcctcccgcaccattcaccagttagcgttgtacggatggggtatcgccaagcggtaaggcaccggtttttgataccggcattccctggttcgaatccaggtaccccagccatatttcttcgatatttgcggttcaccgcgacggtattggggtatcgccaagcggtaaggcaccggtttttgataccggcattccctggttcgaatccaggtaccccagccatcgaagaagcagcaagacaattaggctacgtagctcagctggttagagcacatcactcataatgatggggtcacaggttcgaatcccgtcgtagccaccaaattctggacgtatcgatacgcatcgataaatccgcaaacaatttgttggggtatcgccaagcggtaaggcaccggattctgattccggcattccgaggttcgaatcctcgtaccccagccaaatttaaaagtcgttcagcagtgaacgcactgttgccctcaaccggcgtagttacggtcaagtgcaacagacaattggggtatcgccaagcggtaaggcaccggattctgattccggcattccgaggttcgaatcctcgtaccccagccacttcaatgcaaaaaagctcacttcggtgggcttttttgctattggcgtcctgacatgcttactccgtactgactgccgggcaggtgctctccgctacgcccctgcccgggaagccggttttacaagcctaacgcatacttcagcgcctgacgcttcagcatcccggcgcgttcagccgccatcaggccaatattacgcagcatccgcaccggcgccaggtcattgctgaaaccggcataaaacagatccatccccgactgcatgataaaattatccgctcgccgccgcgcctggtagcgcttcagcaccggcaggctggcccagtcttcgccgcggccgcgcgcttccgccaggatctccagcagggcatcgacatcacgatagccaaggttaaccccctgccccgccagtggatgaatggtgtgcgccgcatcgcccaccagcgccaggccgggctgaacatactgcagcgcatgacgccgggtgagcgggaaggcgccggccgcctgcggcgtcacccgtcccagccgcgccggaaagtgactggcgatctcctgctggagctgcgccatggtcatgctctgcagctgacggatccgcgccggggcgtcgtaccagaccagcgaggcccagtggtcgaacagcggcaggaaggcgcgtgggccgctgggagtaaactgctgccaggtgctgtcgccgggatcgtcggcgcattcgacgctgatcagcatacaggactgctgatattgccaggcgtgcacgccgatgccggccatctcccgcacctgggagttagcgccgtcggcgccgataaccagccgggcgtggatcgtctccccctcgcgcaaatgcaacgccgtctgcgtctcgccgcgctgcatctttttcagttcgctaccgacgcgcagggtaaccgcctcatgcgccgccagcgcttgccacaggccccattgcagaaccttgttctcgaccatatagcccagctccggcagcttgagctccgcggcgtcgaaggcgacgtgcgcgctctcccactcccaggtctccagacggcgataagcatggacgcgcatcgcccgtatggcatcccagacgccgagactcttcagcaggccgaccgaagccgcgctgatcgccgagatccgcacatccggggcggatgccggttcgaacgccggtggcgccgctttctcaagcaccgtcacggtaaatccctgttgcgccagccctaacgccagggcgccgccgaccatgccgccgcccacgatggcgacatctgttacgtgaattgtcatggctattatccttaaagcagaatccgttaagtttaccggatttttcgccctcttgcggcgataacgctcgcactggtcagggggcgaccaaagcattacaatacgcgccctggaatgcgaaattcaccctgtatatatccccgcgttttggatatctattactgagcatgagcaagtcaatgacaaaaaaactccatattaaaacctggggctgtcagatgaacgagtatgattcatcaaagatggccgatctgctggatgcgacacatgggtatcaactgaccgaggtggcggaagaagcagatgtgctgttgctcaatacctgctcaattcgtgagaaggcccaggaaaaagttttccatcagcttggccgctggaagctgctgaaagagaagaacccggacctgattattggcgtcggcggctgcgtggcttcccaggaaggcgaccatattcgccagcgcgcgcactatgtcgatattattttcgggccgcaaaccctgcaccgcctgccggagatgattaactccgtgcgcggcaaccgcagtccggtagttgatatcagcttcccggaaattgaaaaattcgatcgcctgccagagccgcgcgccgaagggccgaccgcctttgtctcgattatggaaggttgcaataaatactgcacctactgcgtggtgccgtatacccgcggagaagaagttagccgtccgtgcgacgatatcctgtttgaaatcgcccaactggcggcgcagggcgtgcgtgaggtcaatctgctggggcagaacgttaacgcctggcgcggtgagaattacgacggcaccaccggcagctttgccgacctgctgcgcctggtcgccgccatcgacggcatcgaccgcattcgcttcaccaccagccacccgatcgaatttaccgacgatatcatcgacgtttatcgcgatacgccggagctggtgagcttcctgcacctgccggtgcagagtggctccgaccgtgtgctgaacctgatgggacgcacccataccgcgctggagtataaagcgattattcgcaagctgcgtgaagcgcgcccggatattcagataagctccgactttatcgtcggcttcccgggcgaaaccacggaagatttcgaaaagaccatgaagcttatcgccgacgtcaatttcgatatgagctacagctttatcttctccgctcgcccgggcaccccggcggccgatatggtcgacgacgtgccggaggcggacaaaaaacagcgtctgtatatcctgcaggaacgcattaaccagcaggcgatggcctggagccgtcgcatgctcggcacggtacagcgcatcctggtggaaggcacctcgcgtaagaacatcatggagctttccggacgtacggagaataaccgggtggtcaacttcgaaggtaccccggacctcgtcggtaagtttgtcgatgtcgaaatcgtcgatgtatacaccaactcgctgcgcggtaaaatcgtgcgcaccgaagcggagatgggtctgcgtatcgctgaatcacccgaatcagtgattgcccgcacccgtaaagagaacgatcttggcgtgggaatttaccagccatgatcccttcaggcctgtcggttccggcaggccttgtaattcctctctccgtccctatatctacagcaatgcttgcgccattttcctgtgacgtaaataatttcctgattagccggccacgcgccgcgtccggccacctgcgtaaagaggaatagtttgaacatagacactcgtgagattaccctggagccagcggataacgcacgcctgttagccctgtgcggcccgtttgacgacaacattaaacagctggagcgtcggttaggcattgagatcaaccgccgtgacaatcactttaagctgaccggtcgcgccctgtgcgtgcacgctgccgccgatattctgcgcagcctgtatgtcgacacagcgccaatgcgcggtcagattcaggatattgaaccagagcagatccacctggcgatcaaggaagcgcgcgtactggagcagagcgccgaaagcgtgcctgagtacggtaaagccgtcaatatcaagaccaagcgcggggtaatcaaaccgcgtacgccgaaccaggcgcagtacatcgccaatatcctcgatcacgacatcactttcggcgtgggtccggcgggtacgggtaaaacctatctggcggtggcggcggcggtcgatgcgctggagcgccaggagatccgccgtattctgctgacccgtccggccgtcgaggcaggcgaaaagctcggcttcctgcccggcgatctgagccagaaggtcgacccgtatctgcgcccgctgtatgacgcgctgtttgagatgctcggctttgagaaagtggagaagctgattgagcgtaacgtcatcgaagtggccccgctggcctatatgcgcggacggacgctgaatgacgcctttatcattcttgatgaaagccagaacaccaccatcgaacagatgaagatgttcctgacccgcatcggctttaactccaaggcggtgatcaccggcgacatcacgcagattgacctgccacgcagcaccaaatccggtctgcgccatgccatcgaagtgctggcggaagtcgatgagatcagctttaacttcttccatagcgaagacgtggtgcgccatccggtggtcgcccgcatcgtgaacgcctatgaggcatgggaagccgcagatcagaaacgtaaagcagagctggccgccgagcgcaaacgcgaagcccaggaacaggagcaaaaatgagtcaggtgatcctcgatttacagctggcctgcgaagagaccagcggcctgccggacgaagccctttttcaacgctgggtcgacgccgtcattccgccgtttcaggaggagtcagagttaacgattcgtctggtcgacgttgcagaaagccatgagctgaacctgacctatcgcggcaaggataagccgaccaacgtcctctccttcccgtttgaagcgccgccgggaatggaaatgccgcttctcggcgatctgatcatctgccgtcaggtggtagagcaggaagccagcgagcaaggtaagccgctggaggcgcactgggcgcatatggtggtgcacggtagcctgcatctgctgggctacgatcatatcgaagacgacgaagcggaagagatggaaggccttgaaacagagataatgcttgctctgggctatgaggacccgtacatttccgagaagattgcggaatagcgcccagccggatggcggtgcttgcgcctcatccggccgctgtttctgcgttttacctgccagaaagtcaggcaacccatgccgtccggcgctgagtctacgcgcgacgagcgacagttaaatcaacatgagaacccaaacgacgccatgagcgacgacaattcacacagtagtgacacagtaaacagcaaaaagggatttttctccctgttactcagccagctttttcacggggaaccgaaaaaccgcgatgaactgctggcgctgatccgtgattccgggcagaacgatcttatcgatgaagatacgcgtgacatgctcgaaggggtaatggatatcgccgaccagcgggtccgcgacattatgatcccccgttcacaaatgataaccctgaagcgcaaccagacgctggacgagtgcctggatgtcatcatcgaatccgcccactcgcgtttcccggtcatcagtgaagataaagatcacatcgaagggattctgatggccaaggatctgctgccgtttatgcgcagcgacgccgaagccttcagcatggaaaaagtgttacggccggcggttgtcgtcccggaaagcaagcgggtcgaccgcatgctgaaagagtttcgctcacagcgctatcatatggcgatcgttattgacgaattcggcggcgtctctggcctggtgaccatcgaggatatccttgagctcatcgtcggggaaattgaagacgagtacgacgaagaagaagatatcgatttccgccagctgagccgccacacctggacggtgcgcgccctggcctccatcgaagacttcaacgacgccttcgacacgcactttagcgatgaagaagtggataccattggcgggctggtgatgcaggccttcggccatctgccggcccgcggcgaatctatcgacattgatggttaccaattcaaggtagcaatggcagatagtcgtcgtatcattcaggtgcatgtaaagctgcccgatgacgctccccagccgaagctggaagagtaagcggtagcgctgaaatggccagccgggagaccgcgagtcatacacggttgtaggtgccccgcgtccggctggcaaaaagaatagcctgtagcagcaggcgttaattaacgggacgattaacctaaatggtatttgcctctcttcttgaacgccagcgcgtacgtctgttgctggcgctgttgtttggagccagcggaacgctggctttttcaccttatgacttctggccagcggctatcgtttcgctgatcggtctgcaggcgttaaccctcaaccgacgcccgctgcaaagcgccgggatcggctatttctggggactcgggttgttcggcacgggtatcaactgggtctatgtcagcatcgcgcagtttggcggaatgcccggcccggttaacgtcttcctcgtcgttctgctggcggcctatctctcgctctacaccggcctgtttgccggcctgctcgcccgtctgtggcctaaaactaactggatacggatggctatcgctgcccctgtcgtctggcaaatcaccgagttcctgcgcggctgggtgctgaccggctttccgtggctacagttcggctacagccagattgacggcccgctgaaaggcctcgcgccggtgatgggcgtcgaggcgattaacttcctgctgatggtagtcagcggcctgctggccctggccctggtccagcgcaactggaagccgctggcgattgccgcgctgctgttcgccctgcccttcccgctgcgctatatccagtggtatcagctgctgccggcgcgcgcgacccaggtctcgctggtgcaaggcgatatcccacaggccatgaaatgggacgaaaagcagctggtcaataccctgaaaacctacctggcgctgacccagccgcatatcggccactcgcagctgattatctggcctgaatcggcgatcccggatctggagatcaaccagcagcagttcctcagcatgatggacgatctgctgcgcgcaaaagacagctcgctgatcaccggcattgtcgatgcgcgtctcaacaagcagaaccgttacgatacctacaacaccatcattactctcggcaaagataacccgtaccgctacgactcgaccaaccgctacaacaagaaccatctggtgccgttcggcgagtttgtaccgctggagtcgattctgcgtccgctggcgccgttctttgacctgccgatgtcctccttcagccgcggcccctacgtgcagccgcagctgatggcgcataacctgaagctgaccgcggccatctgctacgagataatcctcggggaacaggtgcgggataacttccggccggacaccgacttcctgctgaccatctccaacgacgcctggttcggcaagtccatcggcccgtggcaacacttccagatggcgcgaatgcgcgccctggagctggcccgcccgctgctgcgcagcaccaacaacggcattactgcggtgatcggcccgcgcggcgagatccagaagatgatcccgcagtttacccgcgaggtgttgaccaccaccgtgacccccaccagcggcttaaccccttacgcccgcaccggcaactggccgctatgggcgctgacggcgctgtttggtttcgccgcgctgctgatgagcctgcgccagcgtcgccgataagtttctccgccggcgacgcccgtcgccggctttttcttcccgtcatctgccactctggcacagtcattgctttatttaacctggtagcggcctcgtccgacccagtgcaaccgggttgcaccagaaacgatcggtggtcgcgctattttggtgcaatggaagatatttgcctccgattggtgcggagcgcttcgcaaaaataaacaataaagcagcaaaatctttacattaagccaaactaaatgctaacaaacacatacaaatgcggcacgtggatgcgtgcccccaataacaacacacacaatcacaatgggtatcaatagcgtcgctgacgctgcggataaggagttggatatgcaattacgtaaactggccacggcaatgctggtaatgggaatgaccgctggtctggcgcaggcggaagatgctgccccggcggctggccagaacaccctggataagatcgccaaaaacggggttatcgttgtcggccatcgtgaatcttcggtcccgttctcttactacgataaccagcagaaggttgtgggctactctcaggattattccaacgccatcgtcgatgccatcaagaaaaaactgaacaaacccgatctgcaggtcaaactgatcccggtcacctcgcagaaccgtatcccgttgctgcagaatggcacctttgatttcgagtgcggctcaaccaccaacaaccttgagcgccagaaacaggcggccttctccgataccatcttcgtggtcggtacccgtctgctggtgaagaaaggcggtccgatcaaagatttcccggacctgaaggataaagcggtcgtcgtcacctccggaaccacctcagagatcctgctgcataagctgaacgatgagaaaaaaatgaatatgcgcattatcagcgccaaagatcatggcgactctttccgcaccctggagagcggacgcgccgtggcctttatgatggatgatgccctgctggctggcgaacgcgccaaggcgaagaaaccggataattgggaaatcgtcggcaccccgcagtcgaaggaagcctatggctgcatgctgcggaaggacgatccgacgttcaaggcgctggttgatgaaaccgtcgcccaggctcagacctctggcgaagcggagaagtggtttgacaaatggttcaaaaacccgattccgccaaaaaatcttaacctcaacttcgagctgtcggacgacatgaaagcgctgttcaaatcacctaacgacaaagcactgaactaattataacaaccaggggcgggatatcctgccctcccgatgattgtcacagcacggacagactatacggcggctggtcgttccccagccgccgcgaataccgaaacaagctggacaaccgtcttcgagggtagcactggctacccttttttttccaggagtcatgtatgtcaatagactggaactgggggatattcctgcaacaggcccccttcggcaacactacctacctgggctggctgtggagcggttttcaaatcaccgttgccctctccatctcggcctggatcatcgcttttctcgtcggctcactgttcggcattttacgcacggtacccaatcgcttcctctcgggcattggcacctgctatgtcgaactgtttcgcaacgtgccgctgatcgtgcagttctttacctggtacctggtggtgccggagttcctgccggaaaatatcggcatgtggtttaaatcggagctggacccaaacattcaattctttgtctcctccatgctgtgcctgggtctgtttaccgccgctcgcgtctgcgagcaggtacgcgccgccatccagtcgctgccgcgcgggcagaagaacgccggcctggcgatgggcctgaccctgccgcaaacctaccgctacgtgctgctgccgaacgcctaccgcgttattgtgccgccgatgacctcggagatgatgaacctggtgaaaaactcggccatcgcctccaccatcggtctggccgatatggccgcgcaggcgggcaaactgctggactactccgctcatgcctgggagtcttttaccgccatcaccctggcctatgttttcatcaacgcggtgattatgctgattatgtatgtggtcgagcgtaaggttcgcctgcctggcaatatgggaggcaaataatgtacgattttgactggagttcgatcgttccctccatgccctatctgctggcagggctggtgatcaccctgaagattacggtgatcgccatcgtggtcggcatcgtctggggcaccctgctggcggttatgcgcctgtccagctttctgccgctggcctggtttgctaaatcctacgtcaacgtattccgttcaatcccactggtgatggtcctgctgtggttctacctgattgtcccgggcttcctgcagaacgtgctgggactgtcgccgaaaacggatattcgcctgatctcggcgatggtggcgttttcgatgttcgaagccgcctactattcagagattatccgcgccggcattcagagcatctcccgcggccagtccagcgccgcgctggcgttggggatgactcactggcagtcaatgcggctggtgatcctgccgcaggccttccgcgccatggtgccgctgctgctaacccaggggatcgtcctgttccaggatacctcgctggtgtatgtattgagtctcgccgacttcttccgtaccgcctccactatcggcgagcgtgacggaacccaggtcgaaatgatcctgttcgcgggcggcgtctattttgtgattagcctcagcgcctcgctgttggtcagctggttgaagaaaaggactgtgtaatgattaccctgaaaaacgtttcaaaatggtatggtcactttcaggtgctgaccgattgctccacggaagtgaaaaaaggcgaagtcgtggtggtctgcgggccgtcaggctccggtaaatccacgctgattaagactgtgaacggccttgagccggtacagcaggggcagattattgtcgatggcaccgtggttaacgataaaaagaccaacctggctaaactgcgctcgcacgtcggcatggtgtttcagcattttgaactgttcccgcatctgtcgattatcgacaacctgacgctggcgcaggtcaaagtgcttaaccgcgataaagcctcagcgcgcaagaaaggcctcaagttgctggagcgcgttggcctggcggcgcatgcggaaaaatacccggcgcaactctccggcggccagcagcagcgcgtcgccattgcccgagccctgtgtatggacccgatcgccatgctgtttgatgagcccacctcagcgcttgacccggagatgattaacgaggtgctggacgttatggtcgaactggccaacgaggggatgaccatgatggtcgtgacccatgagatgggctttgcccgcaaggtggcgaaccgggtgatctttatggatgaagggaagattgtcgaggatgccgataaagaggctttctttgccaatccgcaatccgagcgtgccaaagatttcctcgccaaaatacttcattaatgttttttctctgcgcataccgcccggtatgcgcagttaatcttttccgccatattattcgccaatgttatttatgcggtagatgatcgctactatcatttacgtacccaataaacctgggcgataaaagctgaacttatttattaaatcgatcaattcataaagaattcaataatgaattcgtggaccggcattgccaccgccgctagcatataacgcctcgtaacaggttcgtcgcacgattattttattaattgaatataatattcttgcctgacctcgcctgcgccgaaataaaggccatcaatattctctgccgctcgcagaataatggatgcgccaccaaaccaatgaaacaaatggatattgcttcatgttaattcgatctcgcacgctcaccgggctgctgtttatcacgctggcgggcacctcagccgccggggccgcgccattggcctcttctactcaccagacggagcaggataaagcccgccaggaagcgctggcgccgcagcaacaggattttcagtcttcacaacagcgcgtggcgccgcagggtatcccttttcctgaggaaacgcattgcaaattgatcaaccgggtcgatatcgactccgataaccaggcgctcacccggaaattactggcgaaaaccgcgcggcaggcgcagggacgctgtctgggtagcgaaggcattcgcctgctggcctataccttgcaaaatgagctgatcgcgcaaggctacatcacctcgctgattgatgtgccctcccagtcgctggagcacggcatactcaggttcacgctgcactatggcaaagtgggcgctatcgactatgccgacggctcggacaccacccgcctgtggaattccctacccacctcttccggtactatcctgcgcttaagcgaccttgagcaagggatggccaacctgcagcgtctgcccggcgccaccgcgcacatgaaactgctgccgggccagcacgagggagaaagcgatatccagatcgcccgcagcctggcgaaaaaatggcagcttggcgcctggcttgacgacgccggcagcaaagccagcggacgctaccaggccggcggggccctctatctctatgacctgaccaccctcaacgatatcctgtacctttccggcgggggcgatattgaattcaatcagcataacgacggcaaccacaacggcagcctgtattactccattccctttggctactggacactaagcgcctacggggcatacagccagtatcgtcagcagtttaacggcaactggtcgacgatggattataagagtaaaaatcgctactacagcgccacgctgagtcgtctgctctcccacacccggcagcaaaaaaccaccgctgacctgcggatcgccaagagcacctcgcattattacttcggcggcagtgagctactggtgatgcgcaagcagaacccctcatgggaattcaccctcaaccaccagcactactttaacaaaaagattgttgatgccagcatcggcatccagcgcagcctgccgtggctcagctcgacagcaacgccggaagagcaggccgggctgtatagcccgctgtcgcggattgtgcatggtaatctgcaggcaatgatgaaatttgacgccaccggcgacaaatttacctgggctccccgcctcagcgcccagttcagcccggacaaactcgcttccgataataaattcaatattggtagtcgctggagcgtgcgcggttttgacggtgaaaacagcctgtccggcaatcagggatggtactggcgcaacgattttatctgggatctggccacccacgagcggcaattctatttgggcgcggatataggccgtcttatcggtgccgatctatatcaaaaaggcaaagtgctctccggcgccgtcagcgggctgcgcggtcagctatggtcaacgcagtacgatctgtttattagtaccccgctgagtaaaccggataagtttcatagcgacgccctgaatatgggcttttcattacagtggaggtattaattcgcacattattgactcgtcatatttacattatttattaatcattatttaaaggaataaagaaaatgtttaagtttaaggcttcttatgtcgcactggcggcagtattaacctcgtcggtagtttatgccgaccccacaagctatacgcactcttccggcgccacggttatcgatattgaaaagccgaacgccgccggtgtctcccataacctgtaccgcgacttcaacgtcggcgccaatggcaccatcctcaataacagcggcgatgatgtcagccacagcacatttggcaatatcgcccgcaacaataatctgaccgccggcagcgcttcggtgattttgaacgaggtgacctccaaaaacgccagtagcctgaagggctttatcgaagtcaacggtcagaaagcggatgtggtaatcgccaacccgaacggcatcacctgttccggctgtagctttgttaataccaacaaggctatcctgaccaccggcaaggttaatatgaccgacgatggcgccatcggcagctataccgtaacgggaggcaccctcaccatcggcgaaaatggcatgaacgccgccaacggctacgcggttctgctcgccgacgcgattaagattaacggtaaagtgcaggccaacaacgccctggtcagcgcgggcaacttcaccatggataacagctctggctcggtgacctccgccggtaaaaaggccaccctgatccagatgacggttaacccgcagtacagcatcgacgtcagcagccttggcggcattgaggccaacagcatcagcatggtcggcaataacatcggctttggcgtacgtaataagggttctattatctccaacggcacgctgatgctcaccagcaacggtaatttactgaacaaagggtcaataacgggcaaaggtttgctgagccaggtttccaccgtcacgggcatcaccaatgacggtagcatcgccggcgcctattatttaatgctctccagtggcgattatatcgttaacaccggttctctctccggcggccagctgattgccaccgctaacggcaacatcaccaacggcgactcaggcacgatgaccggcaccagtggattaagcctgaccagcggcgggaaaatccgcaacgaagaaaaagcctccctgctgtcaaataaccagattgccgccacggcaatcggtgatttcctcaatgaaggcaaaatcagcgccaaacacaccagcctgacgtttgtcggcgacagctttaaaaacaccggcaatattaactctactggccaaaccaccattcagtcgcttacacaggacggcagcgccaatacgggcgagatctataacctcggcaatatcaccggcgaaaatatcaatctgcagaccaatggcacgctggcgcaaagcagcagtggtcgtattgaggcaaccaacgccattaccgcccacagctactggctgaaccaaaatggttatatgaatgccgccgatatcaccaccgatcacggcgtagtgaataattatggcaatattactgccaaaaatatttcaatcacgacctactcagatatcaccaacgaagggcagatcagcagcaccggcgacctgatcttaaataccaaaaataaaggcgcgatctacaattattcaaccctcagcgcgggcggcaacatgacgttaactgccaccaaagtggtcaatggtggtaaaagttgcggcatactgggcctggcgaaatgcggcgtcgggacgttaactgctgacaagctggtactgaactcatcgcagaaatatgttagcgacatggatggaaaacagtatttcaagagcaccgaagtcaacacggtgaaataagacaaaccacgatgcgcgaagcctcgcgcatcgtttttcgcacgcttagggctcgaagggccgacgctggaactgatcgtggccacattttggacagcgcggcagcacgtccggggtgtataccgccaggtgatagtggcacttctcgcagaccaggttgcccagaccgaccacttcgccgctgtggtacacgccgtgatgattcagatcctgaaagacttcccgccactcgagctgggttttgtcggtgatatcagccagctcctgccacaggctctctttgatcacccgcataaacacgctgtcgctctcgtcttcgtgactctcttcgtagctgcgggcaaactcctcgaggtcgcgtttgaccgccgcaatcaccgactcgatctcgctctgcgtcagatcgccggcgcggacgattttttcccgcgcctgcgtcaccagcgcgtcgatatcgcgctctccatggcggagccgttcgctgagcgaggagaccagttcacggtaatattgagcaaccttgttcatcatttcgcctccggtggggttaacgtcttctgataatagaccttattcctctcccgctgtgtctgacaagccacagagtcgcgaaataatctgcgcagcttttgccgatgttgatgtgcgaaaagctgttttgacgtgggcgtttgggctatgctatgccgatctgaaataacacatccattggctacactttgtagctgtattgaaaacaggaccactggctgccatgcaagagcaataccgcccggaagagatagaatcgaaagtccagcttcactgggacgaaaatcgtacatttgaagtaactgaagacgagagcaaagagaagtattactgcctgtcgatgcttccttatccttctggtcgactacacatgggtcacgtgcgtaactacaccatcggcgacgtgattgcccgctaccagcgcatgctgggcaaaaacgtcctgcagccgatcggctgggatgcgttcggtctgccggcagaaggggcggcggtgaaaaacaacaccgcgccagcgccgtggacctacgacaacatcgcctacatgaaaaaccagctcaaaatgctgggtttcggctatgactggagccgcgagctggcgacctgcaccccggaatactaccgctgggagcagaagttcttcaccgagctgtacaaaaaaggcctggtgtacaaaaaaacctccgcagtgaactggtgcccgaatgaccagaccgtgcttgccaacgaacaggttatcgacggctgctgctggcgctgcgataccaaggtcgagcgtaaagagatcccgcagtggtttattaaaatcaccgcctacgccgatgaactgctgaacgatctggataagctggaccactggccggacaccgtgaagaccatgcagcgcaactggatcggccgttcggaaggggtagaaatctcctttgacgtcaacgactacgctgacaaactgactgtctacaccacccgtccggacacctttatgggttgtacctacctggccgtcgcggcgggtcacccgctggcgcagcaggctgcggcgaacaatccggcgctggccacctttatcgacgagtgccgcaataccaaagtggccgaagccgacatggcgacgatggagaaaaaaggcgtcgataccggctttaaagccattcatccgctgaccggtgaagaaattccggtctgggcggcaaactttgtgctgatggaatacggcaccggcgcggtaatggccgttccgggtcacgaccagcgcgactacgagttcgccagcaagtacggtctgaacattaagccggttatcctcgctgccgacggctccgagccggatctctccgagcaggcgctgaccgagaaaggcgtcctgtttaactccggcgagttcagcggtcttgattatgaagcgggcttcaacgccattgccgacaaactggctgccatgggcgtgggcgagcgtaaagttaactaccgtctgcgcgactggggcgtatcccgtcagcgctactggggcgcgccgatcccgatggtgaccctggaagatggcaccgtgctgccgaccccggaagatcagctgccggtgatcctgccggaagacgtggtcatggacggcatcaccagcccgatcaaagccgatcctgaatgggccaagaccaccgtcaacggccagccggcgctgcgcgaaaccgacacttttgatacctttatggaatcctcctggtactatgcgcgctacacctgcccgcagtatcaggaaggaatgctggattcgaaagcggccaactactggctgccggtagatatctacatcggcggtatcgaacacgccatcatgcacctgctctacttccgcttcttccataagctgatgcgcgacgcgggcatggtgaactccgatgagccggcgaaacagctgctgtgccagggcatggtgctggctgacgcgttctactatgtgggcgaaaacggcgaacgtaactgggtttccccggttgacgccatcgttgagcgcgacgaaaaaggccgcatcgtgaaggccaaagacgcggcgggccacgagctggtgtacaccggcatgagcaagatgtccaagtcgaaaaacaacggcatcgacccgcaggtgatggttgagcgctacggcgcggataccgtgcgtctgttcatgatgtttgcgtccccggcggatatgaccctcgagtggcaggaatctggcgttgaaggggcgaaccgcttcctgaaacgcgtctggaaactggtctacgagcacaccacgaaaggagaggttgcggcactgaacgtggcggctctgagcgaagatcagaaagcgctgcgtcgcgatatccacaaaaccatcgccaaagtgaccgatgacatcggccgtcgtcagaccttcaacaccgccatcgcggcaatcatggagctgatgaacaagctggcgaaagcgccgcaggaagatgagcaggatcgtgcgctgatgcaggaagctctgctggcggtggtgcgtatgctcaacccgttcactccgcacgccagcttcaccctgtggcgtgagctgaacggcgaaggcgatatcgacaacgcgccgtggccggtagcggatgagagcgcgatggtggaagacagcaccctcgtcgtcgtccaggtcaatggcaaagttcgtggtaaaattaccgttgcggtagatgcaactgaagagcaggttcgcgagcgcgccggccaggaacatctggtggcgaaatatctcgacggtaaaaccgtgcgtaaagtgatttacgttccgggtaaactgctcaatctggtcgttggctaagcgcgggaggaagcgtgcgatatctggtaacaatgttgttatctctggcggtgctcgtcaccgccggctgtggctggcatttgcgtagcactaccaaggtgcccgccaccatgaaaaccatgattttccagtcgagcgatccgaacggcccgttaagccgcgcggtacgtaatcagctgcgtcttaacggcgtggaactgatcgacgccagcacgctgcgtaaagatctcccttctctgcgcctcgatggctcgtcgattcagaaagataccgcatcggtgttccaggatggtcgtacggcggagtatcagatggtcatgaccgttcatgccagcgtcctgatcccgggtcacgatatctatccgattaccaccaaggtctatcggtcgttctttgataacccgcaggcggcattagcgaaagacgccgagcaggatatgattatccaggaaatgtacgacaaagcggcggaacagctgattcgtaagctgccaagcgttcaggtagcggatgttgaagcaacccagcaggaagagaaaccggtcgccagcagcgcggcgccggcttcctcgggtaaccgcgtctccaccacgctgggtcaatgatgattcggttgtacccggaacagctccgcgcgcagctcactgaagggctgcgcgcggcctatctgctgcttggcaacgatcccctgctgttgcaggaaagccaggacgccattcgcgaagctgctgccgcgcagggctttaccgagcaccatactttttcaatcgacaacagcaccgactggcaggcgattttcgccttaagccaggcgatgagcctgtttgccagccggcaaaccctgctgttgatcctaccggaaaacggccccaacgcggcgatcaatgaacagctcgccacgctggttggcctgctgcacgacgacctgctgctgatagttcgcggaaataagctgaccaaggcccaggagaatgccgcatggctcaccgccctggctcagcgcgcagtccaggtcagttgccagacgccggaatacgcgcagctgccgcgctggctggccgcccgggccaaacagcatcagctgcagctcgacgacgcggccagtcagctgctgtgctactgttacgaaggcaatctgctggcgctggcgcaggcgctggagcgtctggcgctgctctggccggacggtaagctaaccctgccccgcgttgagcaagcggtaaacgatgccgcgcactttacgccttaccattgggtcgatgccctactggcaggcaaaagtaagcgcgtgctgcacgtcctgcagcagttacgccttgaaggctgcgagccggcgatcctgctgcgtactctgcagcgggagctgctgctgctggttaccctcaagcgccaggcgacgcacacgccgctgcgctcgctgtttgataaacatcgggtctggcaaaaccgccgtcagctgctcagcgacgccctcacgcgcgtgagcggggaacagctgcgccaggcggtgacccttctgacccgcgcggagctcacctttaaacaggattacgggcacgacgtctggcccgaactggaaagtctttcgttgttgctctgccacaaagccctggcggacgtttttattgatggttgatatgactcagttacaggcaatctatggcggcaccttcgatccggtgcattacggtcacctcaagccggttgagatcctggcgaatcagattggcctgagcaaggtcatcatcatgcctaacaacgtcccgccgcaccggccgcagccggaagccaccagcgcccagcgcgtgcacatgctgaagctggcgattgccgataaaccgctgttcacgctcgatgaacgcgaactgcggcgcgataccccctcctggacggcgcaaacgctgcaggagtggcgccaggagcaggggccgcgcaaaccgctggcgtttatcattggccaggattcgctactgacctttcccacctggcacaactatgaaaccattctcgacaatgtccatctgattgtttgccgccgcccgggttacccgctgaccatggcgcaggaagcggatcagcgctggctggatcgccatttaacccacgacgtggagtctctgcataaccgcccttccggcgtgatctacctggctgagacgccgtggttcgatatttccgcgacgatcatccgccagcgccttgagcgcggcgagtcctgcgccgagatgctgcctgccgccgtgctggattacatccgcgagcagggactctattgctgaccccaggctgggcctggcgcgaaaaaagcgctatcgtaacgccatctcttcatcgcctgtcagagcctgttcatgaaattgtggttagttcgccatggcgaaaccgaagccaacgttgccgggttatacagcggccatgccccaacgcccctgacgccgcgcggcgtcgctcaggcgcgcgcgctcggcgaacggctgcgcctggcgcctttcgataaagtattctgtagcgagctggcgcggaccgggacaacggccgatctgctgcttggcgaccgcgctattccgcgtgagcgccatcccgcgctcaatgagatgtttttcggcgactgggagatgcgtcatcatcgcgacctccagcgagaagatgcggaaaactatgccgcctggtgtgccgactggcagcatgcggcccccaccaacggcgaaagctttcagaattttgcccgccgcgtcagcgagtttatcccaacgctgaccgactgccgccatcttgaccatctgctgatcgtcggccatcagggcgtcctgagcctgctgaccgccctgctgttgcagatgcctgcggcggcgatgtggcactttcccattgcccatggcgcctggagcctcctcgaaatccgcgacgatttcaccaccctgcgggtattaaatagccaggccgtctggcagccgcaagaagaattcccgccagaccattgacaggccagagcaggctgttattctccgctgccaggcagcatccgccaaagccggtttgcagaaattgttttacaaaaatggcgatgcaatccgcggcgagggatgggatgatagcccgccacgaacgcctgccgacagacatttcacccgactttttcatcagttcaggtatactgtcaggctctttatgattatcaatcttcacgcacccagggggaacacttgcagggtaaagcactccaggattttgttatcgacaaaattgatgacctgaaaggtcaggacatcgttgccattgatgtacatggcaaatccagcatcaccgattgcatgattatctgcaccggcacctccacgcgtcatgtgatgtctatcgccgaccacgtggttcaggagtcccgcgccgccggcatgctgccgctgggcgttgaaggggaagccgccgccgactggatcgtcgtcgacctcggcgacgtgatggtccacgtcatgcaggaagagagccgtcgtctgtacgagctggaaaaactctggagttaatgcgtgaagttgcagctggtggccgttggcaccaaaatgccggactgggtacagaccggctttagcgagtatctgcgccgttttcccaaagatatgccgttcgagctggtggagatccctgccggtaagcgcggtaagaacgctgatatcaaacgcatcctcgaaaaagagggcgagatgatgttagccgctgccggtaagaaccgcatcgtgaccctggatattccgggtaaaccatgggatacaccgcagctggcgcgcgaactggaacgctggaaacaggacgggcgcgacgtcagtttactggtaggcggtccggagggtctctctcccgcctgtaaagcagcggcggaacagagttggtcgctctccaccctcaccttacctcacccgctggtgcgcgtactggtggccgagagtctgtaccgggcgtggagcatcaccaccaaccacccgtaccaccgtgagtaatgatgatcagggtagactaagcagcgaatgaaattacagaattctttccgcgactatacggctgaatcctcgctgttcgtgcgccgggcgctggtcgcttttttggggattttgctgcttaccggcgttctgatcgccaacctgtacaatgtgcaaatcgttcgcttcgacgactatcagacgcgctcgaacgaaaaccgcatcaagctggtgccgatcccgccgagccgcggcattatttacgatcgcaacggcaccccgctggcgcttaaccgcaccatttaccagctggagatgatgccggagaaagtcgataacgtacagcagacgctggatgcgctacgcgacgtcgtcgatttaactgacgatgacatcgccagtttcaaaaaggagcgcgcccgctcccatcgttttacctcgattccggtaaaggtcaacctcagcgaagtgcaggtggcccgctttgccgtcaaccagtaccgctttcccggcgtggaagtcaaaggctacaagcgtcgttattacccctataattcggcgctgactcacgtcattggctatgtctcaaaaattaacgataaagacgtcgaccgcctggataaagagggcaagctggccaactacgcctcgacgcacgacattgggaagctgggtatagagcgttattacgaggacgttctgcacggtcagaccggctacgaagaggttgaagtgaacaaccgcggccgcgtcattcgtcagctgaaagaggtgcctccgcaggccggacgcgacatctacctcaccctcgacctcaagctgcagcagtatattgaaacgctgctggccggcagccgcgccgccgtggtggtgaccgacccgcgtaccggcgctattctggcgctggtttcaaccccgagctatgacccgaacctgttcgtcgacggcatctccagcaaagattactccgcgctgctcaacgacccgaacacaccgctggtcaaccgagcaacgcagggggtctatccgccggcgtcgacggtcaaaccgtacgtcgccgtctcggcgctgagcgccggggtgatcacccgcaacaccagcctcttcgaccccggctggtggcagttgcctggctcagagaaacgctatcgtgactggaaaaagtggggccacggccatctgaacgtcaccaaagcgctcgaggagtctgcagatacctatttctaccaggtcgcctatgacatgggcatcgaccgtctctcagagtggatgagcaagtttggctacggccactacaccggtatcgacctctccgaggagcgctctggcaacatgccgacccgcgaatggaagctcaagcgctttaagaaaccctggtaccagggggacaccattccggtgggcatcggccagggttactggaccgccacgccgatccagatgaacaaagcgctgatgatcctgattaatgacggcgtggtgaaggtgccgcatctgctgcagagcaccgtggaagacggcaagcccgtaccctgggtccagccccatgagccgccggtaggcgatatccattccggctattgggaaatcgccaaagacggcatgtacggcgtggccaaccgcggcaacggcaccgcgcacaaatacttcgccagcgcgccgtataaaatcgcggccaagtcaggtaccgctcaggtgttcggcctgaaggccaacgaaacctataacgcgcaccggatctccgagcgcttgcgcgaccataaactgatgacagcgtttgcgccttataacaacccgcaggttgccgtggcgatgattctggaaaacggcggcgccggcccggcggtcggtaccattatgcgccagatcctcgatcacatcatgctgggcgataacaacactacgctgccaagcgaaaacccggcggtaaccgcaggggaggatcaataatgacggataatccgaacaaaaaatcgctatgggataaaatccatcttgaccccaccatgctgcttatcctgctggcgctgctgacctacagcgcgctggttatctggagcgccagcggtcaggacgtcggcatgatggagcgtaaaatcggccagatcgccatgggcgtggtgatcatgatcgtcatggcgcagatcccgccgcgggtctatgaaggctgggcgccctacctctatattttctgtatcatcctgctggtagccgttgacgccttcggcgccatctccaaaggggcgcagcgctggctggatctcggtattgtgcgctttcagccgtcggagatcgccaaaatagccgtgccgctgatggtggcgcggtttattaaccgcgatgtctgtccaccgtcgctgaagaacaccggcattgccctggtgctaatcttcctgccgacgctgctggtggcggcgcagcctgacctcgggacctcgatcctgatcgccctatccgggctgtttgtgctgttcctatccggcctcagctggcgcctgattggtatcgccgtggtgctggtcgccgcctttattccgatcctgtggttcttcctgatgcacgactatcagcgtcagcgcgtgatgatgctcctcgatccggaaaccgacccgctgggcgccggctatcacattattcagtctaaaattgccattggctccggcggtctgcgcggcaaaggctggctgcacggcacccagtcgcagctggagtttctgccggaacgccacaccgactttatcttcgccgtcctcgccgaagagctgggcctgattggcgtactgatcctgctagcgctttatattctgctgattatgcgcggactgtggatcgccgcccaggcgcaaaccacctttggccgggtcatggccggtggtttaatgttgattttattcgtttatgtcttcgtaaatattggtatggtgagtggtattttaccggtggtgggcgtaccgttgccgctggtgagctacgggggctccgccctgatcgtactgatggccgggtttggtatcgtaatgtcgatccatacccacagaaaaatgttgtcgaaaagcgtttaaaggggttagcaatgcgtaagcaatggctggggatctgcatagcagcggggctgctggcggcatgttcgagtgatgacgtgcaacaaaaaacggtcagtactccacagccggccgtctgtaatggcccgacggttgagatcagcggcgccgatccgcaatatgaaacgccaaacgccacggcgaatcaggattatgagcgcgacggtaaaagctacaaaatcgttcaggatccggccaactttactcaggccggtttcgcggcgatctatgacgcagaacccaacagcaacctgaccgccagcggcgaagccttcgatccgactcagttgaccgcagcgcacccgacgctgccgatcccgagctacgcgcggatcactaaccttgccaacggacggatgatcgtcgtgcggattaacgatcgcggtccctatggcaacgatcgggtcatctcgctttcccgcgcatccgctgaccgcctgaacacctccaacaacaccaaagtgcgcatcgaccccatcatcgtcgcgcctgacggttcgctttccggcccggggatggcctgtaccaccgtcgccaaacagacttacgccctgcccgcccgtccgaatctggacggaggggacgccgctggcatgagccagcccgcgcccactgacgttcgcccgatcagcaacagcacgctgacgccggcagacagcgtgggcgcgccggtgaacagcggcggtttcctcggcgcgccgacgcccctgaacaacggcgtgctggagagtagcgaaccagcggcagccgccgcgacggctcctgccgccggcgccacgccaacagcgccagtgaccgcgcctggctccattcagggtaatgtggcgcccgctgcggccaccgccgcagccgctggcgccgtggcggcctcgtcctcggcgacctccagcgccagcggtaattttgttgtccaggtgggcgcagtaagcgaccagacgcgggcgcagcagtatcagcagcgcctgagccagcagttttctgtgccaggccgggtcatgcaaaacggcgcggtctggcgtattcagctgggtccctttgctgataaagcacaggccagcgccgtgcagcagcgcctgcaaagcgaagcgcagctgcagtcctttattactcgcgccaactaaacgccgcgggccgcccgttcacctcgcgcatgtaaaagtcattaacaaactcatgcgcaatgtcggatgctggcccgcagagcatttgctatagtaaggcacttttttaactccatcacggatgccgttgttctgaccatgaagacctctttcaccgctcgtttactcattacggcgctctccgttgcagcgctctcctccgctgcccgcgccgatgacctgaatatcaaaacgatgatcccaggcgccccgcagattgacgccgaatcttggatccttatcgattacaactctggcaaggtactggctgaaaacaatgccgactcccgccgcgacccggccagtctgaccaaaatgatgaccagctatgttatcggtcaggcgatgaaagcgggcaaattcaaagagtccgatctggtcaccgtcggcaacgatgcctgggccaccggcaacccggttttcaaaggctcttctctgatgttcctcaagccgggcatgcaggtgccggtttctcagctgatccgtggtattaacctgcagtccggtaacgatgcctgcgtggcgatggccgactacgtcgccggcagccaggacgccttcgtcagcctgatgaacaactacgtaaacgctctgggcctgaaaaacacccatttccagaccgttcacggtcttgatgctgacggacagtacagctccgcgcgcgacatggcgctgattggccaggcgctgatccgcgacgtaccgaacgagtactccatctatcgtgagaaagagttcaccttcaacggcatccgccagctgaaccgtaacggcctgctgtgggataacagcctgaacgtcgacggcatcaaaaccggccataccgacaaagcgggttacaacctcgtcgcttccgccaccgaaggccagatgcgcctgatctccgcggtaatgggcggccggacgttcaaaggccgtgagtcggaaagcaaaaaactgcttacctggggcttccgcttcttcgaaaccgtcaacccgattaaagctggcaaagagtttgcctccgaaccggcctggttcggcgacagcgatcgcgcttcgctgggggtggataaagacgtctacctgaccattccgcgcggccgaatgaaagatctgaaagccagctacgtgctgaataacactgagctgcacgccccgctgcagaaaaaccaggttgtcggcaccattaacttccagttggatggtaaaaccatcgaccagcgtccgctggtggtcctgcaggaaattccggaaggtaatttcttcggcaaaattattgattacattaaattaatgttccaccactggtttggttaaaaatcgaacacttgaaagtgtgatttccatccccatatactattcatccaagtaacctgataactcccgcccttggtgggagttattattttgtcgtaacaccggagctgacatgaaaaccaaacttaacgaactgcttgaattccctacgccatttacttacaaagtaatggggcaggcgttgccggagctggttgatcaggtggtggaagtggtacagcgccatgcgcctggtgattactcgccgtcagtaaaaccgagcagcaaaggtaactaccactcggtctccatcaccatcaacgccacccacattgaacaagtggaaacgctgtacgaagagttaggcaatatcgatatcgttcggatggtgctgtaaccttttccctgacccggccgccgtgccgggtcttctcattcccttctgcgcggctgtgatatactccccaacctgaattctctcttcccggcggagatgttgttttgcagcacaataaaattcttatccggcagcttggcctgcaaccttacgaacccgtctcgcaggcgatgcatgaatttaccgacgcccgtgatgaagataccctcgacgagatctggctggtggaacatcaccccgtattcacccagggtcaggccggcaaagcggaacacgtgctggtgcccggcgatattccggtgatccagagcgatcgcggcggccaggtcacctatcacggtccgggacagcaggtgatgtacgtcctgttggacctcaagcgccgtaagctgggcgtgcgggagctggtgacgctgctggagcaaacggtcgtcaataccctggctgaatatagtatcgagtcgcacccccgcgccgacgcccctggcgtctatgtcggcgaacgcaaaatctgctctctgggattgcggatccgtaaaggttgttctttccacggtctggcgcttaatatcgccatggatctcacaccgtttctgcgtatcaacccctgcggctatgccggtatggagatgacgcaaatgcgccagtggcagccggcagcctccccggagacggtcgctccgcgactggtcgccaatctgctggcgctgctaaatcatccaccacacgaatatcttccccgggattaagcggcaggccaacgtcccgctgtcagcggggcgctaaacgagtaacacgttatttttgcaatcaattgtcacgcacggcaacgcggtgggccgctatacttggcctatcattcccaaccggactcatcgcgtgccagagaatacgcctccgtcagaatctcctgacagacaggatgaacgttacgatcgtcaaatgtttcgcatcctgcgtaatattgacctcaatctgttgacgatctttgaagcggtatacgtgcataaaggtatcgtcaacgccgcgaagatactcaatatcacaccgtcggcgattagccagtcaattaacaaactgcgggcgctgttccccgatccgctatttatccgcaaaggacagggcgtcacccccaccgcctatgccacccatcttcatcaatacatcagccgcggcatggaagctttcctcagcgcgctggatatcaccggtagcccgcaccagcagcgggtgatcactatcgccactacgccagcgatgggagcgctgctgatgcctggcctggccagcgcgctgaagccgacctttccgcagatcctgttgcacaatatcgccatcgtcgacgccgcgcggcagcttgaccagcgccaggtggatctgctcattgatacccacctgcacagcggccaggcgataagccatcatgtgctgtatcaggatcgggtacagatgtactgccgcgcagggcatcccgcgctggacggtccgcaggatgaaacgaccctcgcggagtacgaatttgcgctgctgctgccggaaggccagcgctaccccaccctccatcgccgactacaggaagagatgggcgagcgccgctgcggctttagcacctttaacctgatgacccaggcggcgatgatcgccgggagcgatatgctgggtctgaccaccgaacgcctgttcgccatggtgtcccgtctctggccgctgcagaccctggatttcccttccctgggtggagagcagattgacgttgcgctgcactttaataagctgagcgggaaagagccattgctgaaagagatcatcgagacggtgatccgctcgtttaaggcgtagcgcacggaagggaaaaggataaaacaacaactattttacaatttgccgggcaggcaggctgctttctgccccttttcaatggtatactgcctgctcttgattcaaaaatagttgataattgcaacatttcattgaattaattcgctttccttcgtgactcgcaactggaacacgcacgctatgagtaaacccattgtgatggaacgcggtgttaagtaccgcgacgccgataaaatggcccttatcccggtgaaaaacgtggcaactgagcgtgaagctctgctcagaaaaccggaatggatgaaaatcaaacttccggcagactcgtcccgtatccagggaatcaaagcagcgatgcgtaagaacggcctgcactctgtgtgcgaagaggcctcctgcccgaaccttgcagaatgcttcaaccacggtaccgcgacctttatgatcctcggcgcgatctgtacccgccgttgcccgttctgcgacgtcgcgcatggacgcccggtcgcgccagatgcaaacgagccacaaaagctggcgcaaactatcgccgatatgggtctgcgctatgtcgtagtcacctcggtagaccgtgacgacctgcgtgatggcggcgcacagcattttgccgactgcatcagcgccattcgcgagaaaaacccgtcgattaagatcgaaacgctggttccggatttccgcggccgcatggatcgcgcacttgatattctgacggtgaccccgccggatgtcttcaaccataacctcgaaaacgtgccccgtctttatcgtcaggtacgtccgggcgcggattacaactggtcgctgaagctactggagcgttttaaagaagcgcacccggagatcccgacgaaatccggcctgatggtaggtctgggcgaaaccaacgacgagatcatcgaagtgatgcgcgacctgcgtcgccatggcgtcaccatgctgacgttaggccagtatctgcagccgagccgtcaccacctgccggtgcagcgctacgtcagcccggaagagtttgaagagatgaaagcggaagcgatggcgatgggcttcacccacgccgcctgcggtcccttcgtccgctcttcctatcatgccgacctgcaggctaaagggatggaagttaaataatccaccgcttccgccgctgcgcgccttttcggcgcagcggctctctccgtttcatccgtttcgcctgtccgtaacagttagttgcatcttttctccgcggcgtcgacaaaaacgacaaaggccgcaacgataaacgtcgcggcctcttcgccgtaccgccagcatcccgtcaggagacgcagccggagaattactctttatgagagagcttctgcgccggcgcttcttcttctgcggtggttttcttcgcgctatcgtcatcttcgttcatggcttttttaaagcccttgatagccgaccccaggtcgccgcccagcgtacgtaatttcttggtaccaaacactaagataatcagtgctgcgactaccagcagtttggtaatactaatctcacccatagctaaccttcttctctatacaagctgcgaatacgccatcatacacgcatttatccgtcctattgtaatccacctgtgcgtgggctgcgtgtttcggcccatagcctcccctccgggagtgagcgctgagatgtccatcctgacgtgcacagcgaattattgggataaacaatacgggtatttgacgcgcggacacaatagcaatctgtaacaaggtgaatcaagccttgtttaaaaaaacgtcataataattgcggtggcgcaaatcgtcggttccgcagcactggcaaacgctcgcgaacgcgcgcaaggtcatccgctaagagatcggcaaagatcagctgcggctcgctcccggcccccgccagagtggtccccagcggatcgacgatgcggctcagcccgatattgcgcgttccgcattcgcctgccgccacgatatagcaggtagtatcgagagcgcgtgccgccagcagcgtcgcccagtgatgctctttctgcggccctttcacccatgcagcgggcagcaccagcagctgtgccccattcagggccaacgaaagcgccagttccggaaagcgaagatcgtagcaggtcatcaggccaacgcgtaatcccgccacctcaatcaccggcgggatctgctgaccgggatccacccgccgggactcctgcatcgcgaaggcgtcatatagatgaagtttatgataatgggcaatcactgcgccttcccgcaataccaccaacgtgttggtcgctctcccctcccctgacggcacatggagcgtcaggaccgtggtcaggctgttacgcctgctctcggccaacagcggctgcaaaaatgcgccatccagcggctgggccgatttaactgacagatccgggtcgttgtcatcccgcgccagcaacgcctccggcagcaccagcagcgccgccccttcttgctccgcctgctgcatcatcgccacacaggtttgcgcattcgtccgccatactggcgtgacggcaaattgtcctgccgctacccgcatgttcttctcccgtcaggttatggatagccaatcgcgcccgatgcgcgctacacttgacactctcttacatcaaatagcaggaaacgaccgtgtttcaacttctttgcgccgtttttattggcggcggcaccggcagcgtattgcgctggtggctcggcatgaagctcaatcctgtgcaccatgctatcccgattgggactctaacggccaacctgttaggcgcctttgtgattggcgccgggctggcgtggtttaatcgtctgaccggtattgacccgatgtggaaactgctgattaccaccggtttctgcggcggcctgaccacgttctccaccttttctgcggaagtggtgtttctcctgcagcagggccgggtaagctgggcgctgctcaacgtcgcggtgaatttgctgggttcgtttgcgatgacggcggtcgccttctggcttttctcgcaggcggccagccgctaaaagcgaaggagacaggcaaaaaaaaacccgcttattagcgggtttttatattctactgacgcgttgcttacagagcgatgacgtttgcagcagaagggcctttggcaccgttagtgatttcgaactctacgcgctgaccttcagccagagttttgaaaccgttggactggattgcagagaagtgtacgaatacatctttgctgccatcttccggagtaatgaaaccgaatcctttggactcattaaaccacttaacgttacctttaatcttagacatcaaaattacctttatatgaaaaatcgacactaatgctgtgtcgggtatcagtacaccaattgtggtaccttttgtccagtgcaactttgctaaaaagtgataaaagtcgctatcttttttagtgggtaacgctttagtccttgtttttgcacaagaccttccgcttatctcatttattgctaagatttagcgaattaaaactggaagcgcgcccaggcgaagtaaacgttaccgttattgtaggtgccgggaatataggtcatctggaaagttgccggaccgtaacctattgacgccaatggcaagatcaccgggatcgggatgtagttccagttatcgcgcgccgtgacgccgagggtatagccaaggccgaggtggaaattctggtccgtcagcgggcgccaggttttctcccacccgtagccgccgatgggctcccacttattaaaagagtctttaaacgccatcaggtacaggccatgccagttccctttctcatcccagcgcgagacgccgaaacctgccccccacggacgttcgttatacttatcggttttttccttgtcataggcaaagcgcgcatgccaggtgatggctggaacgtacaaatcatagtgctccggctcattccaggtctgcgctacgttattacttaaggtatggtaaccttcgctaagggtcgatgaaaacgacgcgctggcgtttccggacaccaataaccatcctaaaaaaccaagagaaaacaatgaaaaacgacgtaacatcaacacttttctattaccactttgatttaaaagccacctaaaatagcaaagataatctcaatgcaggttgaacgaaataaggcaaactcctgattttcgcccgctgtccatcagaacggcttaactatccatctggtgattatatccaggcgtgatgggggacgtgtagttcttatcgctttattgatttgcatcagcgagttttgtccgttttttcggcacattcgcacattaaaatttggtgtggtgctttttatctacatattctttgggtttaggggtaataaatgctgacgtttattgagatcctgatagggatcgtggtcattgtgggcgtagcccgctatatcattaaaggcttctcggccaccggggtgctgttcgtcggaggcttaatcttactgatcgtcagcgccctgctgggacataaagtgttaccgggtaataccgcgagcaccggctattccgctaccgatattattgaatacattaagattctactcatgagccgcggcggcgatttgggtatgatgatcatgatgctatgcggcttcgccacctatatgacccatattggcgccaatgatatggtggtcaaattagcgtcgaagccgttgcgctatattaattcgccctatctgctgatgattgccgcctattttgtcgcctgcctgatgtcgctggccgtctcctccgcgaccggccttggcgtactgctgatggcgacgctgttcccggtaatggtgaatgtcggtatcagccgcggggccgccgccgccatctgcgcctcaccggcggcgattatcctctcgccaacctcgggtgacgtcgtcctggcggccaaagccgctgaaatgccgctgatcgactttgcttttaaaaccacgctgccgatctccatcgcggccattatctgcatggcgatcgcccactttttctggcagcgctatctggataaaaaagagcacatttctcacgagatgctcgatgtcaacgacatcaccaccaccgccccggcgctgtatgccattctgccgtttaccccgatcatcggcgtgctgatctttgacggtaaatgggggccggagctgcacattatcaccatcctcgttggctgcatgctgctggcggcgatcctcgagttcctgcgcggtttcaacaccaaaaacgtctttagcgggctggaagtcgcctaccgtggaatggccgacgccttcgccggcgtagtgatgctgttggttgccgccggcgtctttgcccaggggttaagcactatcggctttatcaacggtctgatctcaatcgctacctccttcggctcggccagcattattctgatgctggtgctggtgatcctgaccatgctggcggcgatgaccaccggttccggtaatgccccgttctacgccttcgttgagatgatccccaagctggcgcactcctccggcatcaatccggcctacctgtcgattccgatgctgcaggcttctaacctcggccgcacgatatcgcccgtctccggggtggtggtcgccgttgccgggatggcgaagatttccccattcgaagtggtcaagcgcacctcagtgccggtgctcgttggcctgctggtggtgatcgttgctactgaaatcctggtgcccggcagcgcgctccactaatggtctaaccacgcgaaaaggcgccagcgggcgccttttttatgctttaataaccccccgttatcttttgccatccataatcaggaataaaaatgttcaggaaggatttcgccgcgattgcccttgtgcttaccgccactcaggccggtgctgaaccgctcaccgcgacgcgatacgctgattttgaccgctacgtccttgccctctcctggcaaaccggattctgtcagagcatgtatgaccgcaatcgcaacgaaccggaagagtgtcgcctgcagcaggacaccgcgaataaagccgactttctgaccgtgcatggcctgtggcccgggctgccaaagtccattgccgcgcgcggagtggatgaacgtcgctggatgcgctacggctgcgccacgcgtccggtgcctaacatgccggaggtaaaagcgaaccgcaaatgccaggcggcggagaccggactgtcgctggagatggccaataaacttaataatgtgatgccgggatcgggcggcacctcctgcctggaacgctacgaatatgccaaacatggcgtctgcttcggcttcgatcccgacagctactttggcgccatggtgcgactaaacggtgaaattaagcgcagcccggtgggggattttctcgcgaagcactatggccaaacggtcagccgcgccgacttcgacgccgccgtggcccgcgcctggggtccgcagagcgtaaaggcgtttaagctaacctgcaacggtaatccggcctatctgacggagatgcaaatctcgctcaacgccgcgaccatcaacgccccgctggccacttccgcttttctgccccagcctcacccgggtaactgcggcgcacagtttatcctcgataaggttggccactagcgtaaagcgggatgctgattggaaaacaccgtccgccggatggtgttgcacgctgaatgtgcgtttcatcacttcaaactgccggcaactctcagtatgatggtaggaccttaacccttgcccctttcggcgagggttttcttttacggacaggttcctggataacatggagtatgcaatgaccagacccgcaatcatcattaatgaactggatgccgaacgtatcgacaggctgctggagcagccggctttcgccaactcaccggttgccgatgccctgaatgaggaactcgaccgcgcgcaaatgctggccccggaagcgatgccgcatgatgtcgtcaccatgaatagcagggtaaaattccgcgatttaaccagcggcgaagagcgcgtgcggacgctggtgtttccgtcacaggtgaccgacagcgccagccagctctccgtcctcgcgccggtgggcgccgcgctgctgggcctgaaagtcggcagcaccattcactgggagctgccgggcggcgcatcgacgcacctggaagtgctggagctattgtaccagccggaagccgctggcgaattccaccgctaatcccgctgcctgaggcgtttcgcgctttattcagaggatgtccgcacatcctctttctgctgttttcccgccgcttacccttttttacgctttgcgcctgcctggctgacagttttgcgacctgaatgacacaatatccgcatataatatgttgatatagacgcaaacgaacaaggaggattgcatatgtataagactatcattatgccggttgatgtctttgagatggcgctgagcgataaagccgtccggcacgcggagtttctggcccagcaggacggggtgatccatctgctccacgtcttaccgggttccgcgagctttaccatgagccgttttaccgccgacctgcggcggtttgaggaacatctgcagcatgaggcggagactcgcctgcagacgatggtcagccacttcagcattgacccgtctcgtatcaagctacatgtccgttttggcagcgtgcgcgatatggtcaacgagctggccagcgaaattaacgccgacgtggtagttattggctcacgcaatccctccatcagtacccacctgctcggctccaatgcctcaagcgtgatccgccatgcccatatcccggtaatggtcgtcaggtaagaatgacgaaaagagtataaaaaaagaggctacccctgggtagcctctttgttatgcaggtctattgtctgacttgttatgcggttttcgtgcggatcaggtagtcgaaagcgctcagcgacgcttttgccccttcccctgccgcgataataatctgtttgtacggcacggtggtgcaatcgcccgcggcgaacacgcctttgacgttggtttcgcacttcgcatcgatgatgatctcacccatgcggttgcgctcaacggcgccttccagccaggtggtgttaggcagcaggccaatctggacgaagatccccgccagcgcgatatgatgctcatcgccgctcacccggtcacgatactgcaggccggtgactttgctgccatcgcctttcacttccgtggtctgcgcattaagaatgatgtcgacattcttcaggctgcggactttatcctgcaacacctggtcggctttcatctctggggcaaactccagcagggtcacatgctctacgacgcccgccaggtcaatggcggcttccacgccggagttcccgccgccgattaccgctacgcgtttgcccttaaacagcggaccatcgcagtgagggcagtaggtcacgcccttggtgcgatactgatcttcgcccggcacgttcatattgcgccatttcgccccggtggcgatgatgacgctacgcgccttgagcaccgcgccggaggcggtttcgatctgatgcaggccgccctctgtcgccgccggcgtcagtttggtcgcgctctgggagtcgatcacgtcgacgttatagtcattgacgtgcgctttcagcgcgcctgccagcttctggccttcggttttcggcaccgaaatatagttttcgatatccacggtatccagcacctggccgccgaagcgttcgcccatcaggccggtacgaatccctttacgtgcagagtagaccgccgccgccgcgccggacgggccggagccaacgatcagtacatcgtaagcgtcacgctgattcagctcttccgctgcgcgtttttccgcaccggtatccactttggcgacgatttcagtcagcgtcatccgtccctgaccaaactcctgaccgttcatgaacaccgctggcacgcccatgacgttacgctcggtgatctcattctggaaggtcccgccgtcaatcgccgtgtgtttgatgcgcgggttgagcaccgccatcaggttcagggcctggaccacgtccgggcagttatgacaggagagcgaatagtaggtttcgaattcgaaatcgccatcaatatcacggatctgctccagcagcgactgggcctctttcgacggatgaccgccggtccacagcagcgccagcaccagcgaggtaaactcgtggcccagcggcgagcctgcaaaacgcgggccctggtcggaacctgggttagtaatcaggaacgagggcttacgtaccgcgagcgtgttgtcttctttaaaggtgactttgtctgacagttcagcgatttcagccaacagttccttgatttctgccgatttagcgctgtcatccagcgtggcaatcagctcaacaggcttggtcagcttctcaaggtaggccttgagctgggttttcatgttggtgtcgagcattgttatctcctgggcttaaaacatcatcatgcaagcggcctcgtcaggctgcctgaatgcgcttgcatcatggtgttggaataaaatgggcgcgaaagcgcccattgattgccgggtggcacgccgtttacccggcctacgatcttgtaggcccgtgcaagcgtagcgccgccgggcacaaacagacttagatcttaccaaccagatctaaagaaggagccagcgtcgcttcgccttctttccatttcgccgggcagacttcgcctgggtgagaagcaacgtactgcgccgctttgattttacgcagcaggtcagacgcatcacggccgataccttcagcggtaacttcgatcgcctggatgataccctgcgggtcaacgacgaaggtagcgcggtcagccagaccttcatcttcacgcatgttgtcgaagttacgggtcagggcgccagtcgggtcgccgatcatcgcatatttgattttggcgatggtttcagaactgctgtgccacgctttgtgggtgaagtgggtatcggtagacacagagtaaacgtctacgcccagcttctgcagttcttcgtaatggtcagccacgtcgcccagttcggtcgggcagacgaaggtgaagtcagccggatagaagaagaagacgctccagcggccttcggtgtctttctcggtgacttcgatgaattcaccatttttgaatgcctggtttttgaacggtttgattttggtgttaattaaggacatctatacttcctccgtgttttcgttgaggtctaagttaacgaatttttcctgacccgaccaatgcgtttacattatcgaatcaataagcgttatctaacaaccggaacaagacaactctgtgaacctgtcgacgcgttcagcgctaatcgctgtttttcgcatcatttgccgcgacaaaagtaaaaaggccaccttttcaggcggccccgttacctgaaatacccgagggtaggttcagcgccagtcagactggctatgtgttgcgctctacattaccttaatgtaacagcatccaagattacatcacccacgccagcaaagggcaatccgtcattctgctgatcttgcctatgactgtgataggttcgacaatcgttttgccctttcctgctgattttacaaggaatacttatgttaaagcgtcttctgttactcagccttttgccgttatgcagccatgcggaggaactccccgctccggtaaaagcgattgaaaaacagggcattaccattataaaaccctttgaggcgccggggggaatgaaaggctggctgggcaaataccaggacatgggggtcgccatctacctaacgccggatggtaaacacgcgatctccggctatatgtatgatgagaacggcagcaacctcagcgagcagctgtttcagaaagaactctataccccggcgggacaagagatgtggaagaagatggccagcgcccactggctgcaggatggtcgcaaggacgcccctatcgtgctgtatgtctttgccgatcccttctgtccctactgcaagcagttctggcagcaatcccgcccctgggtagaggccggtaaagtgcagatccgcactctgctggtgggggtgattaagccggagagcccggccaccgccgcggcgattctcgccagcagcgatccggcgaaaacctggcatgattacgagcaatcgaatgggaaaatggctctgacgatcccgaaagcaattccgccggagaaaatgaaaatgctcaacgtcaaccagcagctgatggacgatctgggagccaacgtgacgccggcgatttattatatgaataaagataatatgctgcagcaggtggtcggcctaccggataaagagaaactgcatattatgatgggtgaaaaagagtaattccatcccgcaatggcgcctggcggaagcgaccgctggcgccaccgtcgacgataagatatattaagcagaacttaactgtatttgccaatagttaaattcacaccgcaaatattaagccacaaaacattatcattaagaatattataatccgcaccggtaataaacaggactgcattaatggcaaatctttacgatctgaaaaagttcgatttgaatttattggttattttcgaatgtatctatcaacatttgagcatcagcaaagcggcggcgatgttatttatcaccccctcagcggtgagtcagtcgttgcagcgtctgcgccagcagttaaacgatccgctatttgttcgtgttggcaaaggaatgacgcccaccaccgcctgcgtcaatcttcattatcatctacagcaaaatctggagcagctggaaaaaaccatcaatctaaataatcgctcagaactgcgtaaacgtattgtgatatatggccccccgctgttctgttcagtcaatagccacgttatgattaaccagctctgtcatcaggcgaacttgcaaattgagcaccataacctgaccaccaccgaatcggctgaggagctgctggcgtatcgccaggcggacctggtgttcacccgcatgcccattaccaaccgcgccacgatctgtcagccctatcagacggtgcagacgctggcggtttgccgggcgggccatccgcgacgcgaaacgcttacctcggtagagtcactggcgcaggagtttttcactcactatattaccaacgatcccgttattcagcgcgtgcagcaaagcagcatcgcctggctgaatccgcgcaatattgcctttcgcagcgactcttttatgaccattcttaacatgattaataaaaccgacttaattggctttttgccttcctatttatatgactttatctcacccactatgcagcttcacgccatcaacatagataatctttttccggatatcacgatctacattaattaccaccatgcatcttcgcaaaatcattttttaactgaattaatcaccatattaatgaatgatcgagaggcatcacggccccaatttaatcacagcgaataacgcccttctgttcccccgctgccagaaacaataatcgaccattaatttcctacccctcatcgtttatactgagctaacgggaattttctactattaaaggattaatggtcatgtcgtttattaaatatcccttaccggaatcggtgctgcaggcaactgagcagcggatccagtgggtcatggataatttttcgcgcatctgtgtctctttttccgggggaaaagactccaccgttatgctgcatttaaccgcccaggcggcgcggttacaggggaaaaaaatctgcgtgttgtttattgactgggaagcgcagttctcctgcaccatcgcccactgtgaaaaactgcgtgcgctgtatgcggatgttatcgaaaccttttactgggtcgccctgccgctcaccacccaaaatgccctgacgcagtataagccgcaatggcaatgctgggagcccggaaccgagtgggtacgccagccgccgccctgggccattacccacccgggctatttttcattttatcaacccggaatgagctttgaagccttcgtcagccacttcgccgagtggttttcgcagcgtcgtcccgccgccgtgctggtgggcattcgcgccgacgaatcgctaaatcgctttatgacgatttcttcacagcgtaaacagcgcttcgccgacgataaaccatggaccacttcagcgccgggcggccatgcctggtacatctacccgctctatgactggaaaaccgccgatatctggacctggtttgccaaaagcggcgagccctataacccgttgtacgatctgatgtatcaggccggggtgccgctgcgctatatgcgcatttgcgaaccgtttggtcccgagcagcgccaggggctgtggctgtatcacgtgctggaacctgagcgctgggccgcgatgtgccagcgagtgagcggcgcgcacagcggcggggtctatgccgggcatgataatcagttctacggtcatcggaaaatcgacaagcccgaccacctgtcgtggaaaagctacgccctgttcctgctcgacagcatgccggaaaccaccgccgagcactaccgcaataaaatcgccgtctacctgcgctggtaccagaaaaaaggtatggaggatattccggatacccaacctgcggacattggcaccaaagatatcccgtcctggcggcgagtctgcaaagtactgctcaataacgattactggtgccgtcagctttcgtttagcccaaccaaaagcagccactatcagcgctaccgtaaacgcatggaaaaacatcgccaacaatgggggattttatgcaacaacaactgacgcaggcgctggaagcttacctgcaaaagctggatgacgaggcgcgcattgaggctatcaacgcgtttcgccaggtgctccaccactacagccccttccgctcgcagcccgtcgactgcgtgctgtgggtcaaacaggagctgatctcccccaacgactacaacccgaataacgtggcgccgccggagaagcgtctgctgcaaacgtcgctggaggccgacggctttacccagccggtcgtcgtcatccagcaaggcccacaggcgtatacgattgtcgatggttttcaccgccatgagctggcctgcagcaaagccgcgctgaaaaaaacgctaaaaggctatttgccggtgacctgcctgacgagtgaagctgcctcgcgtgacgggctgatggcagcgaccatacgccataaccgggcgcgcggtcgccaccaaatccacgccatgtcagagatcgtccgcgagctgacccagctcggctggacgccgcagaaaatcggcaaagagctggggatggatgccgatgaagtgctgcgtctgaagcaaattagcggcctgacagagatgttcgccggccgccagttctcccaggcgtggacgattaagtaactacagctggcacaaacgcgtcgccgcagccagcagagtcgccggctgtttggcgaagcacaagcggatcagcttgtgcgggaacggatcggcgcagaagacggagagcgggatcgccgctaccccgacttcggtcgtcagccagcggcagaagctgacatcgtctagatcggagatggcgctgtagtccgccagcaggaaataggtcccttcacagggcaggatttccagccggcttgggcgcagcgcttcaataaacagatcgcgacgttcccgataaaacgccggcagctcacgataatgctccggcgcttcgcgcagcatgtcggcgatcgccagctgcgccggggtattcaccgagaaggtcagatactggtgcaccttgcgcagttcggcgctgatggccgccggggccacgcagtagccgaccttccagccggtcatatgaaaggttttgccaaacgaagagaccgccaccgcccgctcgcgcagctgcggatgcgccagtacgctggcgtggccgccctcagcaaagcagatatgctcatagacttcatcgctcaggacatagatctcgcgttcggcgatcgcctgccacagggcggcaaaatcctcgcgctgccagacggtggccgaagggttgtgcggggtgttgaggatcaccagccgggttttctcgctcagggcggcggcaaattgccgccagtcgacgcgaaaatgcggcggctgcagcgcaatacgacgtaactcgccgccggccagcgccaccgcgggggcgtagctgtcatagctgggatcgaaacagatcacctcgtcgccgcggcgtaccagggcggtgatcgccgcatacagggcctccgtcgcgccggcggtgaccgtgatctcgctgttaacgtcgggctggtaaccatacagcttcgccgtcttcccggcgatcgcctcgcgcagcgccggcacgccggtcatcggggcgtactgattcgccccctgcgccacgtggtacgccagacgctcctgcagatagcgcgggccgtcaaaatcgggaaagccctgggacaggtttatggcctgatgctgctgggccagggcgctcatctgggtaaaaatcgtggtgccgagcgcaggaagtttactctctggaatcaaggggttattgttcattctttttataccgattgtaatgctgttgttgaagccactataacacgatgttaatatttggcaatcaagacgcttagacgtctaaatgctaatgttattccacgctacgcccactctggagaaaccatgatccgcgccatcgtgaccgacatagaaggcaccaccagcgatatccgctttgtgcataacgtgctgttcccctacgcccgcgaacgactggccggctttgtgaccgctcagcagcacgctgaaccggtcaaaaccattctcgacaacctgcgccgcgaaacagacgcccccgccgccagcaccgccgaccttatcactaccctcttcacctttatggatgaagaccgtaaatccacggcgctgaaggcgctgcaggggatcatctggcgcgacggctatctcaacggcgactttaccggccatctctacccggacgtactgccggcgctggagcaatggaaagcgcagggtattgatctgtatgtatattcctcaggctcggtggctgcgcagaaattgttatttggctacagcgatgaaggtgatattactcatctgttcacgggctatttcgataccctggtaggcgccaaacgtgaggtgcagtcctaccgtaacattgctgaacatctgggccatgcccctggcaccatcctgttcctgtcggatatccatcaggaacttgatgccgccgaggccgcgggtttgcgcactgtgcagctggttcgcggcgaccgcgacccggcgagccaccatcctcaggttcagcgttttgacgacattcatccggagcagatcccagcatgagcgcattaactcttttttccgtgaccgatccgcaaacgccggtctggcacagcaccgacgccaaagcgattcaggatcaacttaacgccaaaggcgtccgcttcgagcgctggcaggccgaccgcgacctcggcgcaaatcccagcccggaaacggtgattgccgcctatcagcatgcgattgataaactggtcgccgaaaagggctaccagagctgggacgtcatcagcctgcgcgccgataacccgcaaaaagaggcgctgcgggaaaagttcctgaacgagcacacccatggcgaagacgaggtgcggttttttgtcgagggcgctggcctgttttgcctgcacattggcgacgaggtgttccaggtgctgtgcgaaaagaacgatctgatttcggttcccgcccacactccgcactggtttgatatgggatcagaaccgaacttcaccgccattcgcatttttgataacccggaaggctggatcgctcagtttaccggcgacgatatcgccagcgcctacccgcggctggcgtaacgtcaaactgtcgtcagtctaaaaccgccaggcgcgcactttgccggaggcggcgcataccgcgcctcctccggactacccgccccgccgccggcgagcgccaacgcctaaacctcaataaacctcggcggatcaaaggcggtgatcggcggcagttcctcacgccacggggcgatctccacccaacagctctgggcgctacagccttgccccaggcgcgaactgccgcgatcctcggttaacacgttgggattaccgtgcttatcgagcgaccgttcttccttcggatccagcgggtcataccaggcgccggtggacatctgtaccacgccgggcaaaatctgctcgctcaggtgcacccccgccagaatcgccccgcggtcgttatagactttcaccacgctgccttcgcggatatcccttgcctgcgcatcgctcggatgcatccacagcggctcgcgtccctgaactttcgtcgcccggctgacgctgccgtggtcgtactgactgtgcaggcgggcgcgcggctggctggagagcagatgaagcggccaccgcgccgcctcctgtcgctgccgggcggcctcctgttcatcccaccacggatggccagggcattcgcgatagccaaacccggcgacggtggcggaaaagagttcaattttgccggagggggtggagagcggatagcgctgcggatcggcgcgaaaatcggcgagaaaaatttgcggccgctccggcgcgctgtattccagcaccccttgctgccagaagtcatcgaacgagggcagcgcaataccctcctcctgcgcccgcggtcttgactcctcatagagatgacgtagccactgcccggcgtcacgcccttcgctgaacgcttctccgaatcccagccgatcggcgagatcgcagaaaatggcgtaatcgtcacgcgcttcgcccaccggcgggatctgcgcgctcatggcgatcataaacccgtcgtgaccgccgctgccgatatcctctcgctccagcgaggtggtggccggcagaactatatcggagaatttggcctgcgcggtccagtactgctcatgcaccaccaccgtctccgggcggcgccaggcctcgcacagtcggttgatgtcctgatgatgatgaaacacattgcctcccgcccagtagactaaacggatatcgggatagcgccgctgctgaccgtcgaactcataggtttctcccgggtgcagcagcatatcggacagccgcgccaccgggataacgctgtccaccgcattctccccggcgggtaagcgtgggccggaaaacgcttttcgcaccgcgcccgccaggttggtgcaggcgtagccaaacccgaggccgccgcccggggtgccgagctgtcccagcagcgcggtcagggccaccgtcgcccagtaggcctgctccccttgacgggcgcgctggatagaccaggagatattcaccatcgtccggtggcgggccatctcccgcgccaggtcggcgatgcgctgggcgtccaggccggtaatcgccgccgcccacgccggggttttcgctacgccatcgtgctcgcccaacagataagcgcgatagggggcaaacccgacggtatggctggcaacaaacgcctggtcgtaaagggactcagcgatcagcacatagctcagggccagcagcagtgcggtatcggtgcccggccgaatggccagccactcggcgtcgggcaccgcgctgaggtcattgcgcaccggactgatattgataaaccgcgtgccgttggcctgcatcttatccagccagtactggagcatatggtcattggcgccgccgccgttgacctgggcattgcgcagcggcagtccgccgatggcgacaaacagctgacactcccgggccagctcggaaaaatgggtatgctgccggtgcagcgggctcagcggcccgagaatatgcggcagaatacgctcgcccgcggcgctgctataggtattggtgctggcggtgtacccgccaaagcccttgagaaaccggtgcagctggctctgcgcatggtgaaagcgtccagcgctggcccagccgtaggagccgccgtagatcgcctcattgccgcagcgcgccttgaccgagcgcagctcgcgcgccagcaggtccagggccacctcccagctgacttcgacaaagggctctttacctcgcccttctcgtgacgccggcccgtgctggagatagccggcgcgcaccgccggacggcgaatgcgcgtttggctggtcaccgcgtcgggaagcgactggccgatgcgtgagggatttttatcccagggcaccggcttaaccgccacgatctcgccctcactgctctccacctgccaggttccccagtgcatcaccgtataattatgctgtttcttcatagcgcccgcgttcttctcagcttaaggttcattacaataaagcggggaaatagggtaataatccttacccggccagacattgctctgctaaaaaaagctttagcccgcgcaatcttctttttttctctgtagacgccgtatttcccatgcactcacaatattaagaaaattgtctttatccgctaaataaacacggaataagtcaaaaataaaaccacaaaataaaaaaggtctatccgccatcatgaaatattttcaggttcctcatgacaaaataaactttttctctgacgtttctgcgatataacattcctggcataacttagacttattttgtatttgaggtggcgaggtgcttcttgtcatgctaccggtccgcaaccaccttcatcacaggatcataataacaatgtcgcagaaaagaaaattattgcctgccgcgctgggactgctttcccttgcctcgctgagcgtcgctgccgcagacgccctctccttacagggaaaaaccattggcgttgccgtggtcggcactcagcatttctgggatcgcgaggcctttaaaggcgcgacagaggaggtggagaagctggggggcaaagtcattggcgtcgatggcggccgcgataatcaggtgcatgccaataaccacgatattttactgtcacgcaaggtggacgcggtaattagtattctcggcgatagcgccgtcgaaccaaaatttaaagcattgcgtgatgccggtatcccggtatttaccgtagatcatgtttctcaatattcggtcaacaatactacttccgataactacaccttaggctcaaccatcggccgctacatggcggatgaattaggcggcaaaggcaacgtcgccgtatttaacgcgttctccagcgcgctgcgtatttgcggaattcgctacgatcagtggaaatatgtccttaaggattatccggatattcatattatccagcccgagctcgcggaacagttcgccaactcgccggaagacgcgcgcaagaaaaccctcgaattactcagccagtatccgaaaggtaaactggacgccatccatgtcgcctgctgggatcaaccggccatcggcatcgtccaggcgctggaagagaccggtcgcgataaagacgtgaaagtgacggccatcgacgccggtccggagaccctggagatcatggcggagcccggcagcccgttcgtggctaacgtcgcgcagcagccgcatctgatcggccagacctcggctgacaacgtggcccgctactttgccggccagaaactaccggtgcaaacctttattccggtggttccggtgaaaggtccgcaggaagcgaaagcggtgtataaacagttgggatacggcgagctgcagtgattaatcaacatcctggcggggaacgccccgccgctggtctggtcatggagcagatcggtaaacgttttgccagcgtcaccgcgcttaatgcggttaccctgcgcctcaatccgggggagattcatggcctgattggcgagaacggcgccggtaaatcgacgctgatcaagatcctcgccggtgtctatcaggccgacagcggcagcgccaccctcgacggtcacccgctgcccctcggcaatccggcagccatcgaagccgccggcatccgcgttatccaccaggagttgaacctgatcccgcactttaccgtcgcggaatcggtgtttctgggccaggagtatcgcacccgctggggggcgctggatcgccgacggatgaaggccgccacggcgcaatttttccagcaaaactggcagctggcgatcgaccccgaacggctggtgcgcgacctgagcctggccgagcgcaagctggtgcagattgcccgcgcgctgatcgacggcgcagcgcggctggtggtgttcgacgaacccaccgcccccctggaggcgcaggaggccagtctggtctcctccgctatcctgcgcctgcgcgaccagggcattgccattctgtatatttcccactacctcaatgagatagccaccctctgcgaccgcggcaccgtgctgcgcaacggggaagtggtcggctacccggaccgcgatctgctgcagaataccgaagcgctgatcgccatgatggtcggccgggaaatcgaccagctgtatactccgcgccagcgcccggcggcagacaatggggcgaccccgttgctctcggtgcgccagctgagcgacgggcggcagctgcaggatctttcttttgatattcagccgggcgaaatcgtcggcgtcgccggcctgctgggcgccggacgcgatgtgctggtcgacttactctacggcttacgcccggcggaacgcggcaccatccacctcgagggccggccgcggcgcattcgtacgccaaagcaggcgatccgcgccggcatggcgctggtgccacgcgaccgccgccatcaggggctgatcctgcccttcaccaccgccgacaatattaatctcgcctcgctgccggagaccgccacctttggctgggagcggcggggtatcgccgagcagaaagcgcgcgactggatagaacagctggcaatccgcccgggacgcccggggctgccggtacgctacatgagcggcggcaaccagcaaaaagcgatcctcgcccgctggctggggaccgatgcccggctgtttattctcgatgaacccaccctgggggtcgatatcggcgcccgccgggatatttatcaacgtacgcgccagctggccgatcaaggacgggcggtgctggtctcctccagcgacgcccccgaactgctcggactatgcgaccggatcctggtcctctggcgcggcgcgctggcggccaatctgcccacccgcgggctaacgctggacgccctactggtggcgatcaacggcggacaggagccttcaccatgagtactgctatccagcgtcgcggccgtccgggcctggcgacgctgattgaaaaatttcccctgatcctgtttctggcgctgctggtatggctgagcgtacagtcgccctactttctcagctggcaaaatatcagcctgatgctggtccagagcgttccgctggcaatcctttgtttcggcctggtctgcgttatcgccgtgggcggagatgacgtggtctccggcggcatcgacctctccctgccggcgacggcggtgctcggcgtcgcgctgctcagcctcgggctggccgaatggcacacgccgtatctcctgctgctggcgctgctggcggcggtttgcctgctgtgcggggcgatcaatggcttgctggtgctggcggccggcctgccgccgctgctggccaccctctcgacctcggtggcgtttaccggtctgacagatctgttgaccggccagcggcgcatcgcggtcagcgatccgctgatggtcgcctttcgcgacaacagcgtgctgggcctgccctggccgctggtctacctgctgggggtgtttatcctgttccagttcctgctccaccactcccgcttcggccagcatgtgcaggcggtgggcggcaatcgcgatatggcgcagatgagcggcctgaacgtgcgccgcttgaccctgctggtctggctgttagcgggcattgccgccgggctggctattctgccgctgctcagccagggctccggcagctccagcgggacggccacgccgctgctgctggagaccgtgctggcgacctttatcggcgccgccttctcgcgccgtcgggtggtcaccatctggggcgcgctgctgggggcaatcctggtcaacgccctctctaacgggctcggcctgctgggggtcaatatcttctggatgggcgccattaaaggcggcctgatcctggtggtgctggcggcctcggcggtcagacacaaaggaggcgaggcatgagtcaaatcaccctgaaaacctctgcgtcggcggaacagacggccagcagcccgctggcctggctgtcgcgggccggatttggcgtcatcatcctgctggccatcgccctgtttggctgggcgaatccggtatttttaaccgtggataactgggccaacctgctgcagggcagcgcgatcctgctgattgtggcgatggcgatgaccctgatcgtcagcgccggggcgattgatctgtcggtgggcgtcgcgctcgatttcggcgccgccttcgccctcgtcgccctgaaaacctggcatctgccgtggcaggccgcggtgggctgcgctctgctcggcggcgtgctgattggcctgctcaatgcctttctgatcctcatctgccggatccgccccttcctcgccacgctcggcacctggtttatcgccagcagcgccgagcgcatctataccgacggcggcggcgcgatagcctatcggcggatggctccggagtatcacgacctggcggtgggcaaccttggtgggatccccacgccggtagcgatcgtgctggcgctgtggctggcggcctggctggttaccgagcgcaccctgtggggcaaatatgtccgcgccatcggccagaacagcgaagcggcgcgtatcgccgggatccgcgatcgcctgaccatgctcggcgtgctggtgaccgcctcggcgctctgcgccgtcggcggggtgatcctctccgccaacctgcggcagtttaccccgctggccgggcagtcttacctgatggacgccattgcggcagtatttatcggcactgcctttacccgtctgggccgggtcagcatcctcggcaccctcggcggcgtgctgttccttgccattattgataacggcctgaacctgatggggctcaattatctggtgaaggacgcgctggtcggcgtgattctggtggtgaccctcgccctatccttctggcaggcgcgcctgcgccaaacgcatcgctaaacgggagaacgatggcaacctttgacgccgtatttgtcggcctgactattctggatatcgccgggcgcccggtggtggcgatcccgccgcgcggcggcgtcgcctttattgagcaaattcgtctcaaccccgccggcaccgccgccggggctaatatcaacgccgcgaagctcgggatccgcaccgcagcggtggcctgcctgggcgaagatgaaaaggccgactttatcctcgccagctatgcccggctgggcatcgactgctcgcttatccagcgcaccgcgctgaaggagacctcggcgacgatcctgccgattcgccccaacggcgaacgtccggccctgcactgccggggcgcgtctgacgccctgtttgtcagtgaagcggaatttgacgccgtccttgactgtcgtttcctgcatcacggcgggaccgggctgctggcggcaatggaccagggacagagcgcgcggctgttgcaggcggccaaagcgcgcggagtcaccaccagctttgaccttatcgccccgaatgaagagaccctcgaactactgcggcccctgttgccgtcggtggattatttcatgccttcgctggaggaagccgcctttctctccggagagacgcagccggaggccatcggccacttcttcctggcgctcggcgtgggcacctgcattctgaaagacggcgagaacggctcctggcttatcggccgcgatggcgggccgcagcatattgcgccgtggccggtcgaggcggtggataccaccggctgcggcgacagctactgcggcgggtttattgccgcactggcgcgcggactcagcgtgaaagcagcgtgttacgtcgcctcggcggtggccgcgctggtggcgaccgggatgggatcggatgccggggtagtggactgggaacagacccaggcttttatggcggcccatcgcccctgacgatggacccgcgccgctgcagaacgcggcggcgcaagcggcttaacgccactggtacagcagcggctccccggcgacatagcgctgaagatcggcggcaatcatcgccgtgtgtttggcgatactctcccgggtggctccggcgatatgcggcgtgataatcacgttatcgaactcgatgacaaaaggatgatcgcgccacagcggttcgcggtgatagacatccagcgccgcgccgcccagcgggccgtggcgcagggcatcaatcagcgctgcctcgtcgaccaccgccgcgcgagaggtattgatcagcagcgcgcctggcttcatgctgtttaacagcgcggcattcaccagcccgtcgctgtgcggcccgctgctcaggtgcaggctgacgatatccgcctcgcggaacagcgcctccagggtcgttttctgtagccctggctcattgatatcctctgcggcgacgaacggatccaccaccaacaccgccatgccgaacgcccgggcgatacgcgccacccggcggccaatgttgccataccccaccagccccagcgttttattgcgcagttcagtgcctttaaacacttcataggggctttccgggctcacgtcccagaccacatcccgccgcagaccctgctgggtggcggcggcggcattgtcagcctgcgtgaattccccccgcttcagcgccgcatgggattgcggaatatggcgcgccaggctgagcatcaggccaagcgtcagctccgcggcggcatcggcattgcgccccggggtgtagagcacccggatgccgcgcgcctgggcggcctgggtatcaatattcaccggattcgcgcgggtgcaggcgattacctgcaggcgcggacaggcggccatcaccgcgtccgtcacctcatcatagctggtcaccagcacctcggcgtcgtgggccagctcaatcagctgaccggcgctgagtttcggtttgcccagcgcccacccctccaccagcagctcgcccagctggtggaaggcgctaaggtcgccagcatgctcggcggtaaaaacgattttcatggttgtaggtcctgagaaagaggttgaagggcggcctgtctggcctgccataccggcagcatctgctcgcgcagcaggcggtaaacgggatacagcgccgcgtagcgggcatgcgcctgagggcgcggctgatagcgggtctgcgccagcggaggcgtctcggccagcgccgcgacgctacgggccgccaggatcgccgcgccgcgcgcgctcagttcgttaaaggcgctggagaccaccgtgcgtccggtacagtcggcgataatctgcagccaggtcgccgaggctgcgccgccgccggtcagatacagctcgccgccctgcggataaccctgcagcgcatcgacaatggcgaaggccaggccttcaaacaccgcgcgctgcagttcggcgcgggtggtgtgcgggctaatgccgaaaaagccggcccgcgcgtccgggctgtaaaacggcgcacgttcgccattgaggtacggctgccagaagacgccgccgctgcctggctccaccgccgcgatcgcctgctccaggtgccccagatcggcgtccagcgaaatatgctgctgcagccagtcaatgtttggcgtaccggcctgcatcggaaacagggagatcacctgtccggcttcggtatgggtgacaaagcgcgtcgcctcgttcaccgtctgcgggccgcggcagacgatcccggtgcagcaggtggtgccgaggatcgtgtagatatccccttcgttgaccgcgccgcagcccagcgcggcgctacagacatccagcgccccggcggccaccggcgtcgcggcgggcagcccggtcagcgccgccaccgcgtcgctcagcgtgccggccagggcatccggggccagcagcgggggaaacagcggcagcagttcgttcagccccatctcgttcatcaccaccgaggaccagctgccggtctgctgattgagtaacgagctgctggcgtccgtcagctccagcgccgccacgccggtcaggcgaaagcggatccagtccttggcgaaaaacagatagcgcgcggccgccagccgcgccggctgatactgtttcagccagtacagctgcaggctggtattgcagggctgcaggtgggtgccggtatcggcgaaatagcggcggtcgaagccgggtcggcgcagcaggtcgctcattagctcgtggctgcgggtatcgctccacaggatccccgggcccaccggttcgccctgctcatcgctgagccagaccccctccccttgcccggcgaggccgatagcccgcagccgccccgcctgtagcgccggatggcgggcaatctggcgcagaatagccagcaccgaatgccacagctgggtcatatcctgttccgcgtagccattggccgacaggcggggtgaggtattttccgcggcgctggcgcaggcggtgaaatgctgatcaaacagcaccgctttcacccgcgaggtgccaatatcgataccaagataaaaatccatacctgctccggctcagggctcgtagcggcggcgcatcagctcgcactcgaacaggaactccagcccctccagttgacggcgggcctcctgaatatctttcccccagcaggtcaggccgtggccgcgcagcagaaagccgtagcgcagcgggcgggtttgcgcataatcggcaatccgcgccgccagggcgtcaatatcctggtcattatcgaagatggcgatcggaacggtatcgagatggctatgctgcccgctaagggttttctgcatttcatacccctgcagcgccagcgtgtcgcttttttcgatgcgcgacagcacagtggcgttgacggtatgcacatgcagcaccacgttggcttccgggaacaggcgatacaccagggtgtgcagaccggtctcggccgacggcttccgtccggaaggcgcctggttggtggcgatctcaacctgcagaaaatcctcggttgtcaggctgcctttgtcgcggcccgactcgcttagccagcaccaggtatcatcctgacgcaccgacatattgccgccggtcgccggcgcccagcctttcgcgccgatccaatgacaggtggtgaccagttgcgcgagtctttcttgccacatagcagttccttaggttagcgatgatttatttagccgtctaaatggctatttatccgatactaacaccgctaaccggaggggacaatatttcagtaaacacacacaagacaaatggttatatcataaaagcatattaaataacctttattcacagtgatttaaccaaccgttttcagtacaccactattctccactactctctggccaaaaacaggcggatcgtcctggctaaaattctcctccggcgccagggatgcgctcaccgccctcctctgccctggactggtgcaaaacctggcaggatgcacagtagaatggcattacccgtccgggatccttcaataaatgtgcatgttgcacaccgcgcgctattccccgtgcccggtttttcctggcacatctcttgctacttccggctatcaccgcccatctaccagccagaggttccaggatgtcaaacagcaatgattttcccctcgtcgaagcgcccgccgccggacgcaaaggcgtattttccatcgccatggtgttgttcagctttacctttttcaccggcacgatgttcgccggcggtaaactcggcgtctccttttccatcgtcaatctgctgtggatagccgtcatcggcaacgccttgctggccctctatgccgcgtcgctgggctggatcgccgcgcgcagcggcctgaatacggtgctgatgggccgcttctgcttcggggagattggcagcaagctggccgattttattcttggctttgccgagctgggctggtacgcctggggcaccgccacggtcgctatctcgttggtgaagatcctcgctctgcccgaggcgctgacccagccgttgatggtgctgtttggtattctgttctgcgtcaccgcgctggtgggctacaaggggctggacgcgctgtcgcgcctgtcggtgccattgatgtttgtgctgctgatggtctccatgtatctggcgctgcaccacgccggcggctggcaggcgatgacccgtattgcgccgagcgacaccatgacctggtcggcggccatcaccatggtcttcggcactttcgccagcggcgccacccaggcgacaaactggacccggctggccaactccagccggaccgccattctcgccagcatgggcagcttcctcatcggcaacgggctgatgatcgtcgccggcgcctggtgcgctatcgtctatcaacaggccgatatcgttgaagtgctgatcctgcaggggctgtcggtggccgcggtgatcatgctctgtctcaacctgctgaccatccagggccccaccatctataacgtctccgccgccgcctgccatctgctgcgcagcgaacgtcgccggacgctgaccctcgccgccgccggggtgggcattgtgctggccattggcgggatgtacgaaatgctgatccccttcctcgtgctgctgggcagtattattccacccatcggcggggtgatcctcgccgactactggttcgcccgcggcgggcgctatcccctgctgcagaacgcccgcctgccgcgttttaactggctgggactcggcgcctacgccgccggcgcggtggtggcctatctttcgccgtggatcgcgccgctggtggggatctccgtctccgcgctggtctatatcgccctgactctgctaagcaaacgccagcctgccgccgtcgcggagcaggagccatgagcctgacggtcagcgaactgctggcccttgagggactctccgccctgcgtctgcgggcgggaaagcaagggctgcagcgggccgtacgctggtactatgtggcggaaaatgaacatatcgccgagtggatcatgggcggcgagctggtgtttatcaccggcatcaaccatccccgggatgaagccaacctgatccagttgctgatggagggcaaacagcgcggcatcgccgggatggtgatcctcaccggcgaggcctatatccacgccattcccgccacgctgatcgcccttgccgacgagctgggcatgccgctgatcgagcagccctacctgctgaagatggtgattgtcaccgagcgcatcggcaccgcgctggtccgcagcgaaaacgtcctgcagtcgcagcgcgacattctgatgcagctggtcaccggcgactatccggacctgcagatgctccatcagcgcgccctgcaccagcagctcgattttacccgtccgctgcggctggcggcgctgcgtctggaggggctgtcccgcctgtttcgccagttcccgcccgagcaggccgaagcctggctgctgcaggcccaccgcagcgtgcgtcagcagctgcagcagcagctcaaccagcagggcaattcctttccgctgctggagcgcagcaacatgttccttttcctgctgccggatgaggagggggaaggctttcagcagaaaaaatggctacagcagtggctgcaggcgctggcggacggagaggagggtttgtcgctgctctgcggcctctccgcaccagtcaggcagctgcagggttacccgcgggcgctgtcgcaggcgcgccaggcgctggatctgtgcgataccctgcggccaacccagcgcatcagcgactatcagcagctggggtttatcaaactgctgtccgcggtcagcgacccggcgctgctcaacgattttatgcacgacaccctcggctgcctgatcgagccgggccgtaaagcgccgtggctgctgctggagaccctcgagacgctgctgcaggagaacggcaacgtggtgcgggccgccgaccggctgggtctccatcgcaacacgttgcatcagcgcatccagcgcattgaaaaactgaccggctacccggtcagccaccctcagtttcatctcaacgcctcggtcgcgctggtgatctggcgtttatcgcaaaaccatttacaggacccaccatgaaaattattaacgctcgcctgcgccgccaggaggcgctgtttacccttgacctgcaggacgggatgattcaccgcatcaccgcccaggccgcgatgcagactgccgacgccggggatatcgacgcccggggccggctggcgatcccgcccttcgtcgagccgcatatccatcttgacgccaccctcaccgcgggcgagccggagtggaaccgcagcggcaccctgtttgaaggcatcacccgctggagccagcgcaaagcgagtattaccccggaggacacccgtcagcgagcgctgaaaaccatcggcatgctgcgcgatttcggcgtccagcacgtccgcacccatgtggatgtcaccgacccgtcgctggcggccctgcaggcgctgctggcggtgaaacaagaggccgccgatctcatcgatctgcagattgtcgcctttccgcaggagggaatcgaatcgtatcccaacggccgggagctgatgacgcgcgccatcgagatgggcgccgacgtggtgggcggcattccgcactatgagaacacccgcgacaaaggggtcagctcggtgatgtttttgatggacctcgcccagcgttacggccgcctggtggatgtccactgcgatgaaatcgacgatccgcagtcgcgtttcctcgaagtgctggcggaagaggcgcgggtgcgcggcatgggggcgcaggtcaccgccagccacacctgcgcgatgggctcttacgataacgcctactgctcaaagctgtttcgcctgctgaaagcctcaggcatcaacttcatctcctgcccgaccgaaagcattcatctgcagggccggtttgacagctggccgaaacggcgcggcgtcacccgggtggcagagctggatcgcgccggcatcaatgtctgctttgcccaggactcgattcaggatccgtggtacccgctggggaacggcaatatcctgcgcattctggatgccggactgcacatctgccatatgctcggctatgacgatctgcagcgctgtctcgactttgtcaccgacaacagcgcccgggcgctgtgtctgggcgataactacggcctcgccgaaggccgcccggcgaacctgctgatcctcgatgcggaaaacgactacgaggccgtccgtcgtcaggcacgggtgctgacctccattcgccacggcaaggtgattttgcagcgtgaggtggagcacatccgctacccggcatagggcgcaaggcgctgcgcgacgacgcctttctgtgataccttttcaggcagtgtgcgtgaccgacgcccgcccgggcgtcggcttcctggaaaacagacggcgcgaaacgacgatgagcgataaaaaatggattaaggccgaggacgtggccagactggccggggtctcgcgctcggcggtctcccgcaccttcacccccggcgcctcggtgtcggagaagacccggcagaaggtgctgagcgccgcggaagccctgggctatcaggtgaatatcatcgcccggacgatgatcaccggcagcagtaattttatcggcatcgtcaccgccggtttcgacaacccgtttcgcagcaaactgctggcgccgctggtccatcagctggcgctcaatggctttatgccgctgctgatgaacgctgacgatccgcagcagctcgccccctcgcttaaacaactgctgagctatcacgtcgccggggtgatcatcacctccggcgcgccgccgctgtcgctggcggaagagtatctggcgcgcaagatccccgtcaccctgatcaaccgccatgcggacctcgccggctgcgaccgggtgtgcagcgataacgcccagggagcgaagctggtggcggatctgttcagccgccgaggctggcggcaggttggctttattggcgaaaatcgcgagaacttcagcacccgccagcgctatgaggcttttatcgcccggacgtcggatatggcggtgagcagccgcttctgcgacagcggcggctatcaagccggctaccaggctgccagagaattggttgctgaaaaccccgggatgcaggcgctgttttgcgccaccgatatgctggcgctgggcgcccaggacagcctgcgggacgccgccgccccgctgccggccatcgtcggctttgacgatatcccgcaggcggactggcagccctatcagctcaccaccgttcagcagaataccgccctgctggcccaccacgcggtggatttgttaatgacgcggatcgcccgcttcagcctgccctcgcgccatcgcgaagtgccggtgaaactaattattcgtcatagtgctaaatgaaaaaatcattttatgctggagcgatcacagaatcttctgcgaaacccggccacactcattcggcccttcggggctgtttttttcacgcaaaatgcacacgtgtgcaaaatagggagtcactatgcaatctcaggaatcagaagcgctacaggcccgctaccgtctggcctgcgagctggcgaaagcgggggctgagctggcgtttgaatactatcaacagcgcgaggcgttgaccgtcgaccataagggcgacgacctgcaggatgtggtcagcgtggccgataagcgggtggaggcctttgtcaaacagcgcattcagagcgcgtttccggaggatggttttctcggcgaagagagcggcgctcgcctgcccgacgcgcgagtgctgtgggtggtcgaccccatcgatggcaccagctgtttcctcaacggcctgcacacctggtgcctgtcgctggcgatcgtcgccgacggcgaaccggtcatcggcgtggtctacgaccccaaccatcgcgagctgtttcacgccctgcggggccatggcgcctggctcaacgacgctccgatccgtccgcaccccgcgacgacggtcaaagagggcgtgatgggcgtcggcacctcgcatcgcgtcaccccggcggactttctgccgtttctgcaggcgctgctcagcgacggaggcatgtttatccgcaacggctccggggcgttgatgagcgcctgggcggcggcgggccggttgattggctactacgagccgcacatgaacccgtgggacgccctgccggggctggtgctgatgcgcgaagcgggcggcgccagcaacgattttctggcgcaagaggggatccagcgcggcaatccgctgctgctggccagccagacgctctacccgcagctgaaaaagatgatcccacaaccattacattaacccttacgggtcaggctatttctgattatgtactctacacagtaacgataacttcattcacggacgaaccacatcaatcagtcaggcctccgacctgcggagaaccacctatgtctggaattatcgcttttttccgggcgtcgccgccgaaagcgggcgccgcgtttgatgaacaccgttttcgccgggtgcgctggcaaaccttcatcgccatgaccctggcctacgtcaccttttacgtctgccggttatccttcaccgtcgccaaaagcgcgctggtggagctggggatcaccccgacggagctcggcatgatcggctctaccctgttcttcagctacgccatcggcaaactggtcaatggttttatcgccgatcacgccaacgtggtgcgctatatgagcctcggtttattgctcagcgccgggatgaacctgatgatggggatgaccaccaacgccctgctgctggccatcttctgggggatcaacggctgggcgcagtcgatgggcgtcggcccctgcgcggtctcgctggcgcgctggtacggcgttaaggagcgcggcaccttctatggcatctggtcgacggcgcataatatcggcgaggcggtgacctatatggtgatcgccgcggtgatcgccgggtttggctggcagatgggctacctgtccaccgccgcgctcggcgccgccggcgtggtgctgctggtgctgttcatgcacgattcgccgcagagcagcggcttcccgtccatcaacgtcatccgcgatgaaccgcaggaagaggtcgaagcccgcggctcggtgtttaaaaaccagctgctggcgctgcgcaacccggcgctgtggaccctcgccctcgcctccgcctttatgtacatcgaccgctacgccgtcaactcatgggggatcttctttctcgagcaggataaagcttattccacgctggaggcgtccgggattatcggcgtcaacgctatcgccggcatcgccgggaccatcatcgccggcatgctctccgaccgctttttcccgcgcaaccgcagcgtgatggccggattcatcagcctgctgaacaccgccggcttcgccctgatgctctggtcgccgcacaattactacactgatattctggcgatgattatcttcggggccaccattggcgctctgacctgcttccttggcgggctgatcgccgtcgatatctcttcgcgcaaggccgccggggccgcgctcggcaccatcggcatcgccagctacgccggcgccggcctgggcgagtttctcaccgggatcattattgataaaacggctatccttgagaacggcaaaacgctgtatgatttcagcacattggcgctgttctgggtgggtaccggtctgggttccgcgctactctgttttaccactgccgccatcgtcgcccggcgccatgccgtcgaacggcagacctcgttctcctcataaccgattaacgaataaggaagaagatatgatgcctgcaagacatcaggggctgttacgcctgtttatcgcctgcgcgctgccgctgctggcgctgcaatctgccgccgccgcggactggcagctggagaaagtggtcgagctcagccgccacggtattcgtccgccgacggccggcaaccgggaagccatcgaggccgccaccggacgaccgtggaccgagtggaccacccatgacggggagctcaccggccatggctatgccgccgtggtcaacaaagggcgtgcggaaggccagcattaccgccagctcggcctgttgcaggccggatgcccgacggcggagtcgatatacgtgcgcgccagcccgctgcagcggacgcgagcgaccgcccaggcgctggtggatggcgccttccccggctgcggcgtctctatccattatgtcagcggggatgccgatcccctgtttcagaccgacaagttcgccgccacgcaaaccgaccccgcccgccagctggcggcggtgaaagagaaggccggggatctggcgcagcgtcggcaggcgctggcgccgaccatccagctattgaaacaggcggtttgtcaggccgataagccctgcccgatcttcgataccccgtggcaggtcgagcagagcaaaagtgggaagaccaccattagcggactgagcgtgatggccaatatggtggagacgctgcgtctcggctggagtgaaaacctgcctctcagccagctggcgtggggcaagatcacccaggccaggcagatcaccgccctgctgccgctgttaacggaaaactacgatctgagtaacgatgtgttgtataccgcgcaaaaacgcgggtcggtgctgctcaacgctatgctcgatggcgtcaaaccggaggcggatccgaacgtacgctggctgctgctggtggcccatgacaccaatatcgccatggtgcgcacgctgatgaactttagctggcagctgccgggctacagccggggaaatatcccgccgggcagtagcctggtgctggagcgctggcgcaacgcgaagagcggagaacgctatctgcgggtctatttccaggcccagggcctcgacgacctgcgtcgtctgcagacgccggacgcgcagcacccgatgctgcgtcaggagtggcgtcagccgggctgccgtcagaccgacgtcggtacgctgtgtcccttccaggcggctattaccgccctcggtcagcgtatcgaccgatcatccgccccggcggtagccatggtcctgccgtagcggcgcggtgtttgtccgggcccgggaaaacctttttttccaggcccggcacgacgtccgttatccgttgtccggcgcaaacgccccggcggcgacctgcgccggggtgaccaccccgctgtccagcacccagccgcttatcagcccagcaggcgtgacgtcgaacgccggattgtaaacggcggcccccgtcggcgcccactgtaccgcgccgaagctgcccgccactccggtcacttccgccgccgcgcgctgctcaatggggatcgccgccccgttcgggcaatggcggtcgagggtggtctgcggggcagcgacgtaaaacgggatctggtgataatgggccaaaaccgccagagaataggtgccgattttattcgccacgtcgccgttggcggcgatacggtcggcgccgacccacaccgcatccacctgcccctgcgccatcaggctggcggccattgaatcggcgatcagctgatagggcacgcccagctcgcccagctcccaggcggttaaacgaccgccctgcagcagcggccgggtttcatcaacccatacgttggtcacttttccctgccggtgcgccagcgcgataacgcccagggcggtccccaccccggcagtcgccaggccaccggtgttgcagtgggtcagcagtcgactgccgggcttcaccagcgcactgcccgcctcagcgatgcggtcgcacagctgtttatcttcttcgaccagacgcaaggcttccgcttccagcgcctgcgggtaatcctcccgggccagcgcctgcttcatgcgatccagattattcatcaggttgaccgccgtcggccgcgccgcgcgcagcgtctccagcgcctgctggagtgcatcccggttcaggccgcgctgggccagcagagccagcagcaggctggctgacaggccaatcagcggcgcgccgcgcacccgcagggtatgaatatggtccaccagcagcgcaacgttatccgccgccagccagcgtgtttcctgcggcaaggcctgctggtcgagaataaaaagctgattttcactcacccgcaggctggtggtctgtaatgtctgcatgtcgttaaatccctgttgcgttgttgtatcacattgtgtcaggatggaatccagaagtatagacgtctgaacggcttaatcagaattcgaggatcgaggcaatgtcgcaataccataccttcaccgcccacgatgccgtggtttacgcgcaacagttcgccggcatcgacaacccatctgagctggtcagcgcgcaggaagtgggcgatggcaacctcaatctggtgtttaaagtgttcgatcgtcagggcgtcagccgggcgatcgtcaaacaggccctgccctacgtgcgctgcgtcggcgaatcctggccgctgaccctcgaccgcgcccgtctcgaagcgcagaccctggtcgcccactatcagcacagcccgcagcacacggtaaaaatccatcactttgatcccgagctggcggtgatggtgatggaagatctttccgaccaccgcatctggcgcggagagcttatcgctaacgtctactatccccaggcggcccgccagcttggcgactatctggcgcaggtgctgtttcacaccagcgatttctacctccatccccacgagaaaaaggcgcaggtggcgcagtttattaacccggcgatgtgcgagatcaccgaggatctgttctttaacgacccgtatcagatccacgagcgcaataactacccggcggagctggaggccgatgtcgccgccctgcgtgacgacgcccagcttaagctggcggtggcggcgctgaagcaccgtttctttgcccatgcggaagcgctgctgcacggcgatatccacagcgggtcgatcttcgttgccgaaggtagcctgaaggccatcgacgccgagttcggctacttcggccccatcggcttcgatatcggcaccgccatcggcaacctgctgcttaactactgcggcctgccgggccagctcggcattcgcgatgccgccgccgcgcgcgagcagcggctgaacgacatccaccagctgtggaccacctttgccgagcgcttccaggcgctggcggcggagaaaacccgcgacgcggcgctggcttaccccggctacgcctccgcctttctgaaaaaggtgtgggccgacgcggtcggcttctgcggcagcgaactgatccgccgcagcgtcggactgtcgcacgtcgcggatatcgacactatccaggacgacgccatgcgtcatgagtgcctgcgccacgccattaccctgggcagagcgctgatcgtgctggccgagcgtatcgacagcatcgacgagctgctggcgcgggtacgccagtacagctgagtgcgcctgtttccctcaccccaaccctctcccacagggagagggagcaccccctaaaaaagtgccattttccgggattgcccggcggcgctgcgcttgccgggcctacagatagccgcataacggtttgatcttgcactctttcgtaggccgggtaaggcgaaagccgccacccggcagacatgcgagcacaattttgcgtttaccttaccctcaccccagatactcaatcaccgatagcccgccgttgtaatcggtgctgtagataatgccttgcgcatcgacaaacacgtcacaggactggatcacccgcgggcggccgggacgggtatccatcattctctcaggcgcagccgggaccagcgccccggtctccagcggacgatacgggttggagatatcgtaagcccgcacgccggcattctgatacgtggcaaaaatcagcgttgagctgacaaagctgccgggacgattctcatgcaggttgtgcggaccgaaatgcgcccctttcgccacataatccgcttcatccggcggcgggaaggtggcgatgctcactgggttggttggctcgcggatatcaaacagccagatcagcttctcgccgtcctcctggttgtcgagcaccgcttcatccagcaccaccagcaggtcacgatccggcagcggcagcgcggtatgcgttccgccgccgaacggcgggctccagttgcgatgactaatcagcctcggctgggtacggtctttgacatccagcagcgtcaggccgccgtcgcgccagctgccgtaggcggtatccccggcaataatggcgtgatgcagcgcatagcgtttgccctgcggccagtccggtgtttcaccgcccgcctggtgcatccccggcagccaccagcgcccggccactttgggcttacgcggatcggccagatcgatggtcaggaagatgtagtcggtaaaaccgtcgatcagcgcagacacatacgcccagcgcccgccgacgtaccagatgcggtgaataccgatgccgttaagcgacaggaaactgatttcccgcggctgcgcgggagtggaaatatcaaagatgcgcagcccggcgctccatcccttgtcctgcacatcgctgaccgtgtcacccaccgagcgggtgtagtacaccttctcatcagcaaaacgggcgtcagcaaacagatcccgggcgttgatcaccagcagcagatcgtcatgcgcctggagatgcacgttccaggtgcccggcggcgcggcaatatagttgacggtggtgggccgggtcggatcgcgaacatcgaccacggaaaaaccctgcgacaccatatggccgatataggcgaatccgcggtgcaccatcagctgcacgccgtccggacgaccgccctgatcgctatggccaatcagccgcatattgcggctgtattcgggggaaggtaatgctgacataggggatccctctcgcccggtggcatggttttccccctctccctacggagaggtccggggcgagggcaccaggccgccgcccaccgccacccggcttgattttatttgttcttcgcttccagcgtcgcgaaccacggcgcgataaagtcttcggtctggccccagccagggataattttccccagcgacgccacgtttaccgctcccggctgggccgccagcagcgcctgcgggatcgccgccgccttgaagtcgtaggtggctggcgtcggctcgccggcgatcttgttggcgatcagccgcacgttggtcgcgccgataagcttcggatccaccgccacgctcaccttccacgggctgccggcctcgcgcatcagctgcagatcctggttggaaatatcaatgctgtagagtttgatctcggtgcggccattctctttcagcgctttataggctccctggctaaaggcatcccaggtgccccagatcgcgtcgattttccctttcggatacttggcgaggatcgcccccaccttgttggcagtgtcgccctgcacatcggatgacacggcgccgatcgactccagctctttaatccccggattttgcttcagcagcgtctggtaagccgcctgacggcgctccatcggcgggaagcccgccacccacagcttgacgatgttggccttgccgttgaaatctttcaccagctggccaaaagagagctcggtcagtgaggcgtcatcctgctggctgaccgtcaccccggggatctcaccgcttaccgcggtatcgaacaccgccactttgatcccggcgtccaccgccttcttcaccagggcggtggaatacgggtcacgcccctgagagagaataatgccatcgtatttctggctgatggcctggttgacgaagtcctggaatttggcgtcatcgccgttgctcaggaaggtgctgattttgaaaccgagctttttgccttcctgcagcgccccggcgacaaactgggtggtgttatcgtcagacccgaggttgcggatcacggcaatgcggatcgggccgttgtgttcggcaatcgccgccggcaccggcgtcggggcggtggccagcgccgccgtcgactgcagcagacccagcgtcatcagagagagtgcgatctttttcatgcggtttaccctgtaaaatgttaagtacggcgctgaaaataggtcagtgccagcgcgccagccagcaccaaccctttaataatgtccatcgcgtaatacggcaccgagagcatcaccagcccgttggagagcacgccgaggatcaccgcccccaccagcgtccccagggcgttcggtttaccggagcccgccagcgaaaagccgatccaggccgccgccaccgcgtccatcagatagccgccgccggcgttgacctgcgaagagccgatgcgcgaggccagcagaatgccgcccagcccggccagcagcgaggcaatcacgtatgctgcgactttgtaacgcgtgatccgcaggccggagagccgcgccgcctccgggttgccgccgatggcgtacatccgccgtccgtgggtagtgaacgacagcgccagctgggcgatcagcgtcaccaccagcatgataatgacgatggtcggcacctgccccagcgcgccaaaggccgccgggatagtaccctccgccatctcgccgctcggcagaaccatgttttcggtaatcgacccaccgtggctgtaggtcattgccacgccctgaatcacaaacaggctggccagggtggcgagcatgtcaggaatgcgcagcaccacgatcagaaaggcgttaaacagccccaccagggtgcagagcgcgagggttatcagaatcgcttcggtggtccccaggccatgccagacaaacagggaaatcaccagcgcgttagccagcgatgccgtcgatccgacggacagatcgaagccgccgatggtgagggaaatcgacaccccaatggcaatcaccgtcacgatggcaatcgagcgcagaatgttgatgatgttgaacgggtcaaggaagttgtccgaggcgaggccaaagaccgccaccagcagcaccacggtcagcaacatgccccacttatagagaaaatcaaaaaatcgctgacggcccgataccgtcgcgtttactgccagggccttgctcacgctgccgctcctccggttgaataataaagcagtgtctcttcccgggcttccgcgccggggatctccgctacgatccgtccgtcccacagtacgcagatgcggtcgcataaaccgaccagctcggcgaattcacccgaggcataaatcacccctttgccttcccgtgccagaccatcgatcagcatgaacagatcggttttcgctttcacatcgacccctttggtcggttcgtcaaaaatcaaaacgttggcatcaccgcgcagccatttgccaatggccaccttctgctggttgccgccagaaagacggcgcagcgtctgaccgggaccggtagcgcgcacgccgaggcgggcaatcacctcctccgcccagcgccaggcctgccgatggccaaacaggctccagcgcgaaaagctgttatcggcgctgaccgccaggttcatcgcgatcggctcttcaatgaaaatgccctctttgcgtcgctcctccgggaccagcgccaggccgcgccccaccgagtcggccggatcgcgcggtcgccacggctggccgttcagctcgccacgctgcacccggcttttgctggcgccgaacagcgctttgcacagctcggttttgcccgcgccggccagcccggcgatacccagaatttcccccttccgcaggcgcagcgaaatatcctgcagcaacgcctcatcatgcagaccgtcaacctgcaacagcacctcttcgccgtgcggcgggcgcggcggcgggaagatatcgctcagctcgtggcccagcatcttttcgacgatctgttcgccgctcagcggcgccatcgggccgctctcaatcagccgcccgtcgcgcagcaccgtcagggtgtcgcagatcgccttcagctcatggatacgatgcgaaataaacaccaccccgatcccctgatgctgcagacggcgtactaccgcaaacagacgctcactttcatgctgatccaacggcgcggtgggttcatcgaggatcaaaaagcggcaatggtgcgacagggcgcgggccaacaggatttgctgtttttcggcgagcgtgcagctgtcaatggagcgccggacgtccagcgccacgtccagctgcgccagcgcctcgcgcgccagctgccgaacccgcgaccagcggaaggtcatgcccggctccgccagcctgtccagcataatgttttccgcaatgctcaggcccggcaccagcgccacgtccacctcctgctgcaccaggtggatccccagctgtttagcatcccgcggcgaacgaatgatgaccggctggttgttgatcgtcacttcgccctcatagtgggcgtgggtgccgcacagcacggccatcagcgtcgacttacccgcgccgttggccccggtcagggcatgcaccgacccgccatggagggtaaagtccaccttgttcagcgcctgaaagccggagaaggccaggctaatgttatgcatctcaaggcgattcgcgctcatcactgctcccgtgcggcaattaatcttctgatttaacgaatttttcatagccgccgctggctgacaactgcgtaaaaagcataagatacaacgaaataatattagccatctggatgtccagacataacatcaggttagcccaacacccataaggacagcttccatgagcaacagcgatatccgcgtcgtgcccggcccggccaactatttctcccatcctggcagccttgagcggctgagcgatttttttaacgccgaccagctctcgcgagcggtgtgggtctatggcgagcgcgctctggccggcgccgaaccttttctgccggcggccttccacctgccggaggcgaaaaagatccgctttaccggccactgcagcgaacgcgacgtggcggggctggtgcaggcctccggtgacgatcgggcggtagtgattggcgtcggcggcggcgcgctgctcgacagcgcgaaagtgctggcccgccgcctgggggtaccgctggtggccatcccgactatcgccgccacctgcgcggcgtggacgccgctgtcggtgtggtatagcgacgccggacaggccctgaattttgagatcttcgatgacgccaacttcctggtgctggtcgaaccgcgcatcattctcaacgccccggcggagtacctgctggcgggcattggcgacaccttagccaaatggtatgaggccgtggtgctggcgccgcagccgaaggcgctgccgctcaccgtgcggctggggattaacggcgcgctggcgatccgcgacgtgctgctggccagcagcgaaacggcgctggcggaccagcgccgcggcgatctgacccaggcgtttcgcgatgtggtggaggcgattatcgccggcggcgggatggttggcgggctgggggaacgttacacccgggtcgccgccgcccatgcggtgcacaacggactgacggtgctgccgcagacggataaattcctccacggtaccaaagtggcctacggcattctggtacagagcgccctgcttggtcaggacgatgtgctggcgcagttagtgcaggcgtatcagcgctttaacctgccgaccaccctggcggcgctggaagtcgatatcaataaccgcgcagagctggaccgggtcattgcccataccctgcgcccgggcgagtcgattcactatttaccggtgacgttaacccctgaggttctgcgcgcggcgtttgagaaggtggaatacttcagccgttaatcaccccgaccgtctatacctaatgatgatgctcaccactctcgcaacgaggtcatcatgcagatcgatttaacaggtaagaaggcgctggttaccggcgccagccgtgggttgggtcgcgcaatcgcgctgtcgctggcgcgcgccggcgccgatgtggttattacgtatgaaaaatcggtcgataaagcccaggcggtcgccgatgaaataaaggccctgggtcggtacggcgaagcggtacaggccgacagcgccagcgcgcaggcgattcaggatgccgtcacccatgcggcccggtccctcggcgggctggacattctggtcaacaacgccggaatagcccgcggcggtccactggaatccatgacgctggcggacattgacgcgcttatcaacgtcaatatccgtggggtggtcatcgccacccaggaagcgctggtgcatatggccgatggcggacgaatcatcaacatcggcagctgtctggctaaccgcgtggccatgccgggcatcgcggtgtacgccatgaccaagtccgccctcaacgccctgacccgtggcctggcgcgtgatttaggccctcgcgggatcaccgttaaccttgtccatccagggccgaccaacagcgatatgaacccggaagacggagaacaagcggaagcccagcgccagatgattgcggtcggtcactacggccagccggaagacatcgccgcggcggtcaccttcctcgccagcccggccgccgggcagatctccggtacggggctggacgtggatggcggattgaacgcctgatcgcacattttctgcaagcctctgtcgcccggcagaggccttcccgcgccgcctcgacgggttgtgttttgcctcttacctgcgttttttctccgctctacagtaccccataagaaattcggaatttatctaatagtcttattatttccttatattttatgtgggcgtacagtggagggacggatgaaaattgtctggtcaaaaacggcagataagcaattttctaaaatcgatactcggtataagagccgcattaaatccaggctggagaagatggatgataaagcttcacctatctcggatatcaaaaaattgtcctctcccgaaaaccactaccggctgcgattaggtgattacagaatcatctacacctttggggatccgccgggcgatacctgctacgtcgtggcggttaaacgccgaaccaccaccacctaccttcatgaggaagataccgaatatgactattcagtacatcaaggatgaagaaggaaaagaccagtatgtcgtcattccttacagcgattactttcgtatgcgcctggctctgctggagtacgacgacgaggatgaaagcgaatgggaagatattccttatgaatcagatatctatgatgacgtcatgctgccgggcgaagtatgcgacgtgatgcataaagaaaacgtcagcctgcaggccgcgtggcgcatcctgcgcgggatgtcccagcaggaggtagccgaaaagcttggcatcagccagtccgcggtgtcacagctggaagcgctggactcccgtccgcaaaagcgcacccgcgagaagctggcggcgatttacggctgtactcaggagcagatcagcctctatctgccgaaagagggttaacagcacttcgccccgcccttgccgccgtagcgcgcgtcctggcgttcgcgaaagaactcttcataagtcatcggcgtctgatccgggtgggttattcgcatgtgctcgacgtagttatcgtaatccggcacgccgatcatcatcttcgccgcctggcccaggtacttacctgctttggagagggtgtcaaacataagtcatttctcttttgtatccctcaccccgagcctctcccaaagggagagggaggatcggaaatgtaggccgggtaaggcgaagccgccacccggcacaccggttaatgcgcccctttcgcctgggtctcaatcgcgtccaggttttcaggcattggctcatacggcgtctctttcgccgtcggtttatcctctttcagcgccgccagcgcggttttaatcgagaatagcgccagcaccaccaccacaatcataaagaagatggtcagcccggcatcgagacggttgttaaacaccagctgcgccagctgtgattcggtatattgcggcggaatgttgccgctgtcgatcatcgcctggaatttattggcgatcgccaggaaaccgactttggtgtccgggctaaacgacttctgccagccggcggtcaacgtacagatcagcagccagctggtcggcagcagcgccacccacgcatagcgctggcgtttcatcttgaacaggaccaccgcgcagagcatcagcgccatccccgccagcatctggttggcaataccgaacagcggccatagggtgttaatcccgcccagcggatcgaccaccccctgatgcaggaagtagccccacgccagcacgcacagcgcggtcgccagcaggttggccggtagcgagctggtttttttcagccccgggctaatcacgcccagcagatcctgcagcataaagcgcgccgcgcgggtgccggcgtcaaccgccgtcaggataaacagcgcctcaaacagaatggcgaagtggtaccagaacgagacatccatcagtccgcccagcgagccgtgcaggatgtaggccatccccaccgccagcgttggcgcgccgccggcgcgggagataatcgactgttcgccgacctcgctggcgatttgatgcagcgtatcaggcgtaatgctaaagccccagccgctcaccacctgcgctgccgaggcgacgacatcggtggtacccgccggcgccagcaccgccatcgggctgttcatcgcgaagtagacgcccggatcgataatacaggccgccaccagcgccataatagcgacgaaggattccatcaacatgccgccgtagccgataaagcaggcctggctttcgttggccaacattttcggcgtggtgccggaggagatcagcgcgtggaagccggagaccgcgccgcaggcgatggtgataaacaggaacgggaacaggttgccggtccataccgggccggtaccatcgacaaacttggtcagcgccggcatcgtcagggtcgggcgcataatcaggatgccaatcgccagccccacgatggtgccgattttcaggaaggtggagagataatcgcgcggagccagcagcagccagaccggcagtaccgcagccacaaatccgtagcccaccaggatccaggtcagctgtacgccggtgtaatcaaaccacggcgcccaggtcgggctttccgccacccagccgccggagatgatggcgaacaccagcatcaccaggcctatcaccgacacctcgccgatgcgtcccggacgcagatagcggatgtagatgcccataaagatcgccagcggaatggtaaaggcgacggtgtatgtcccccacggactgtgggtcagcgctttcaccacaatcatcgccaggaccgcgaggatgatcaccatgatcataaagcaggccaccagcgccaggacgccagcggtcggtcccatctcctctttaaccagttcgccaagcgaacggccatcgcggcgggtcgaaacaaacagcaccataaagtcctgtaccgccccagccagcaccacgccggcgaggatccagatcatccccggcaggtagcccatctgcgcggcgagcaccgggcccaccagcggccccgcgccggcaatggcggcaaaatggtgaccgaacagcacttttttgtcggttggaacgtagtcgaggccatcgttatgccgcaccgcgggcgtcatccgcgtcgggtcaacgccgagcacggttttagcgatatacaggccgtagaaacgatacgcgatcaaataaacgcagaccgcggcgacgacaatccacagcgcgtttatctgctcaccccggtttaaagcgatatagccgagggcgaaggctccgatgacggagagcagcgcccagataaggtatttccctgaattattcattgttgtggtccaccggtagggtaatcaggatgttacattttgtttctagatcacaacgcagaatttaacaacaccgaaacatcgcagatgccgtacacccacagagatttgtctcacattgctagcgagatcacttaaggcaggaaaatgaatgaaagggttaccgtgaacggtgccgtttttttgtcgggtggcggctaacgccttacccgacctacagatccgtagtcctgctaagcgcaatgcgagcagggacactcccggatggcggcgcgctgcgccttatccgggctaccccattgcgccgatacgtagcccggctaagcgtagcgcaaaccggggaaacagcggcttcttagcccagcaccgcggtgcccagacgacaggtgcaacagcgccgccccttctcgtcatacaccacaatctcccagctctggctctggcgaccaagatgcagcggacggcactcgccgcgcactttcccgctggagacggcccggtgatggctggcgttaagctcagtcccgacgacgcactgcccttcttcggtcatcagccaaccggccatcgagcccagcgtctccgccagcgccgcggaagcgccgccatgcagcaggccaaacggctgatgggtgcgcgcatccaccggcatctccgccaccagcagcccctcttccagtcgggtgtagatgatgccaagatgcgccaccatggtattttcgctgctggcgttcagcgccgccagcgtaggctctcgcttccaggccatttacgcccccagcgtcgagccgccatcaaccacgatatcctgcagggtgatatggctggcgtgagaagaggcgaggaacagaatggtattggcgatctcctgcgggcgggcgattttacccagcgggatgccgagcttaaactgctcgccgaagccgcggatccgctgctgctctgcatcgtcgctgacccacagggtgcgctgcatatcggtatcggtggagcccggcgacaccagattacagcgcaccccgcagcccgccagctcaagcccgacggtcagcgccaggcttttcagcgccgccttcgaggcgccataggcgctcatgccgatgcgcggcgtgtgcgcagcatcggaggcgacggtgacgatcgccccgccccgctggcgacggaactgggccatcgtctgctgaaacagattaaacgcgccgccgacgttgaccgcgaaggtctgctgccagtcttccgcgctcagctggtcggtagcgcccatgcgcaggatcccggcggcgttcaccagcacatctaaacgctcggtgttcgccaacagccggctgcatgcctcgcgtacctggtcggcatcggcgacgtccagcgtttcggtggcaaacgggtagctttcgccgtcaaaggcgaggtcgaacccggtgacgttggccccggcctcgacgaaagccagcgcggtggcatagccaatccctttacctgcgccggtcacccacacggtctgaccgcgaaaatccagcgccgccattattgcacctcgcgggtgagcagcgcccaccaggcgtcgatggtcgggtttttcgccagcatcacgaagtcgatgtcaccgtgcactttgcgccagcgggcggccagggccatcatccgcaccgaatccagaccgtagtcgatcaggttttcatcatccagcggttcatcggattcgtcgagcagcggcagaattagcgcgcgcagcgccgctttggaggctgggagcggcagcagctcttcggtcatcaccacgcggccggagcggccggcgacgtatttcagcgccatcaggtgctcttcacggctgaaatctgccagcgcgtcggcgacaaagaacggtttgatatcgcgcataaaagcatcggtggcggtggtcatgcagccgatatgggcgtaaacgccggtgatgatcagctgatcgcggccggtttctttcagcatctcctccagcggcgagcgatgaaacgcgctgtagcgccatttcaccagcacggtatcgtcttcatccggcgctagcgcggcaatcacctgctgctgctccggcgagcgggtcagacccggcccccacatatcattcagcagggcgcggtcttcatcgctctgctctttcggctgggcggtgtagtacaccggaatgccgttctgtttgcagaagtcgcgcagggcggcgatattagccaccactttctccatcatcgcgctgttttcgccccagaagttgaggaaatactcctgcatatcgtggatcagcagcgcggcgcgcgacggctcaaaggcccagttgaccttgttcgccgggatatcgctggcttccggcagcgcatatgcctgtaatttagggattgccattatctgttctccttcagcccagcttgccttcggccagccactgacgtaattgttttttatcgactttgcccaccggcgtcagcggcagcgcggcaacgcactccacgcggtccggcagtttaaattccgccaccccctgctcgcgcaggaagcggcgcacggcgacggcgcgcagcggcgaggtcaccaccagataagcgcagcttttctcgcccagcagattgtcttcgatgctgaccagcgcggcgtggatcaccgcctcatggcgcagcagcaggttttcgatctcttcagcggcgatcttctcgccgccgcggttgatctgatctttttcccggccctggacggtgatatacccatcttcgtcgatcgaaatcagatcgccggagcaataaaacccctcggcgtcaaaggcttccgcgttatgctgcgggctgttgtagtagccgcggaaagtgtacggcccgcgggtcatcaggcggcccacttcgccgcgcggcagcgggttgccgtcggcatccgctacccacacttcatcgtccgggcacatcggacagccctgggtattgataattcgctccgggctatcgttaaggcgggtgtaattcaccagcccctccgccatgccgaacacctgctgcagctggcagccgatttccgccggaatgcgcgcggcgagggtcgctgacaggcgcgcgccgccgacctgcaacagctgcagcgattgcagctgggcgttgctgccccattcgtgaatcgcctgcagccacaggctgaccgccggcggcaccagcgaggcaacgttgatctgatgtttttcgatcagcgggaaacagagcgtggcgctcgggtcagcggcgaggatcacccgcccgccggcgaggaagacgccgagcgaacccggggaactcatcgcatagttatgcgccgccggcagcgcgttgaggtagcgcgtttcagcgttaatcccacagatctcgttgctgcggcggatactgtagtcgtaatcgttatgggtgcgtgggataagcttcggcgtcccggtgctgccgccggagagctggaaaaaggccacttcgtcggcaggggttggattggcgataaagttatccgccgggcggttaatctccgtcgccagatcgcgctcgccgccgtcgttacgcaacagtgcgacgcgcagggaaggatgttccgcgataaacgcgtggagaaagctatcgtcagcaaacagcgcgtgctcgcgatcggcaatcagcagcgccggtttaatctgcgcagcgtaggcgttaagttcgctgcgctggtggctgaacaaagcgttcactggcgcgacgccgatgcgcagcagcgcaaagaaggtcatgtaaaactcggcgacattgcccaactgcaccagcgcggtctccccgcgcttcagtccctggcgctgcagcgagcaggcgaggttgtccaccagctggttaaactggcggtagctaatctgccgctcgccatcgataatcgccacggcgtcgttttccgcgtgacgggtgatcagattggttaacggcagatcctgccagtagcctttttgacgatagcgggccgcaaactcttccggccaacgggtaaatgcaatcatccttgcctcttagttcaagccaaatacgttaagcatggtggtcagtttgacgccggtttcgcgccattcgcccagcggcgaggaggccggaacaatgcccgcgccggcaaacaggcgcagcgtacgctgctgcagacgcgcgcagcggatagtcaccacccactcgccgttgccttcgtcatcgcaccagccgacgatgccgccgaacagctggcgatcgaagggttccagttcagcaatcaggcgcttcgccgcctgatgcgggaaaccgctcagcgccggcgtcgggtgcagcagacaggccagcgacatggcgttttcttccgccagcgcggtgcctgcgatcggcgtcgccagatgccagagcgtcggggtggtaatcagctgcggcgactccggtagcgacagctgactgctgcgcgggcccagcacgctcttcatcgcctgggtcaccagctcgtgctcgtggcgatctttgccggaggccaacagcctgttgcctgcttcccggtccagcacatcgtccggctggcgacgggcggagccggccagcggcagagagctgaagtgctgtccttctttacgcagcagcagctccgggctggcgcccagcagcacgccgccgtcggagagcggcacgtggaagttaaagctggcggggttctgggcgatcagtcgctccatcagcgcgccgctgtcgacgcggtcgcgggtggtaatatcgataagccttgatagcaccactttgtcgacttccggggtggcggtcagcgcggcggcgcgttccaccatggctaaaaacgcgtcctgctccgggatctcccgacgctccaccacctccatcgcctccagcggcgcggcatagcgggcggaacgctgcttttccgggcgagagaacgcttcccagcgctcggggatatagagctcggaaggctgacaggtgtcgaacgggatagccccgaccatcaccggcttgcggatccccgccgcccgggcctcggcaaaggcggccgccatctgctgctggaactcgccgttcagcgcatcgccgccaacggcgggctgtgagaagcgacggaagcagcctgaagtggtaaaactgcggtacggcgacataaagaagaagctgtccggcgacagggtccgggtcggtttctttacatcctcagccagtgacgtttccatatcatcctccaaaaacgataaagatattaagaataattatcatttatattttggttggctaacctaaaaggtattgcccgccatgtcaaccgcgttacgtcatggcgccgccactttggcttgcatcctgctggcacaaagttgaaaatgagacgcatttatcacctttcaaatcaggatgcgatgacgtgaacttcttttctttctgccgccgcggtgcgctgaccggcatgctgttgcttttaggaattacctcagcccaggcggcggactggccgcgccaggtcaccgacagctacgggacgcataccctgccgagtcagccgctgcgcattgtctccaccagcgtgacgcttaccggttcgctgctggcgattgacgctccggtggtcgccagcggcgcgaccacgccgaacaaccgcgtcgccgatagccagggctttctgcgccagtggagcgaggttgccaaagcccgcaagctggcgcggctgtacatcggcgaaccaagcgccgaagcggtggccgcccagatgccggatctgatcctggtgagcgcgaccggcggcgactccgccctgccgctgtacgatcagcttaaaaccatcgccccgacgctggtcatcaactatgacgataaaagctggcaaaccctgctcacccagctggggcagatcaccggtcatgaacaacaggccagcgcgcgcattgccgacttcaataaacagctcgtttcgttaaaagaaaaaatgaaactgccgccgcagccggtgaccgccctggtctataccgccgccgcgcacagcgccaatatctggacgccggaatcggctcaggggcagatgctcgaacagctgggctttagcctggcgacgctgccgggcggcctgcccgccagccatagccagggtaaacgccacgatatcgtgcagctgggcggggagaacctcgcggccggtctgaacggccagagcctgttcctgttcgccggcgaccagaaagatgcggatgccatctacgctaacccgctgctggcgcatctcccggcggtcgcaggcaaacgcgtctacccgctgggcaccgagaccttccgccttgactactacagcgctctgctggtgctccagcgtctctccagcctgttcggctaacgcgggctgcgccatcaggacgggctctcggcctgcacaccttgccgggcggcgctgcgcttgcccggcctacaatgccagcgtcccccagtccagaccgtaggcccggtaaggcgcagccgccaccgggcatcaggccgggtacgcggcctgaacaccttgccgggcggcgcggcgcttgcccggcctacaatgccagcgtcccccagtccagaccgtaggcccggtaaggcgcagccgccaccgggcaatcgcacccgacttaactttcgttgacaatttccgggcgctggaaacggcgcagctcgcgtagcaacccaaccagcagcacaccgacaagcgccagcgcccagccgctggcgctggcggatgccgccggcgtcatcaccgcccctaagccgccgagcagcgccgcgccgatggcgtcgccggtgacgttttgcgcggtccacagaccgttaatccgcccgagcatatgttccggcgtctgggtctggatcagggtgtactgcagcagcgagctaatagcgctcagccagccaaacagcgccaggcacagcgcgcccaatgcccagtgcggcatcaggctgaacagcgcaatggcgacaaacgatcccaccgtcgtcgccagcatcagcgcgcccggccgcaccgtctgggccagctggccgctggtcaacgcccccagcgccgcaccgagcggaatagcggcgtacagcaggccaatctgtccggccgacatctgccagctcccggccagcgccggatagagcacccgcaccgcgctggccatggtcagcagaccgccaagcagcgcaatcccgccgataagcgggctccggcagaggaaggtcagccccgccagcagggagcgcagcggatgctcgcgcggctgcggaggcggcggcagctgcggcagacgcagcagggttaaggtggtgataaaggtccccgccgccgccaggccgaagttccacgccacgccgccggtggccagcagcaggccgccgatcatcggcgaaatcaccgagcccaggcgcaccgtcaacatagtgatggccccggcctgcatcaggttttcccgtcccaccagcgccggggtcgccgccagcagcgcggtcacccccaacgaggcgaagaacccgtcccagatccccagcaggtagatcgccgccagcgacggctccggcagcagggcgttcagacacaggccgacaaagcccacgccgcaggtgccgcgcgccagcaggatcaggcgtttacgttcatagcggtcagccagcacgccccccaccatcagaccaacaaacatcgacgccccggtcagcgtcaccgacagcccgacctgccaggtcgaatgggtcatcatctggatctgcaccggaatggccacgcccagcaggccaagcgacagaatagagataaagcgagcgataaaaacggcgcgaaacgccgggtgagttttcagcaggctgagattgagcagccaggattgtcggttcattacagcgccttgtcgttatttttaataccctttttactgtgggtcatgctaccatagctgaataaaatcgataacgataattactatcattatcatatcagggatgtcagttatgtcgttttctacgaccgcggtacgctctgtcgccgtgcccggattgttgctattactcgccttagccgccgcgcttagcctgaccatcggcgccaaatcgttgccgatcggcacggtattcaccgccttcagcggaacctgtcaaagcgctgattgcactatcgtgctggacgcgcgcctgccgcgcactctggccggtctgctggccggcgtcgccctcggcctcgccggcgcgctgatgcagacgctcacccgcaacccgctggccgaccccggtctgctgggggtcaactccggcgccagcttcgccatcgtcctcggcgcggcgctgttcgggatcacttccccgcaggagcagctgctgctggcgttctgcggcgcgctctgcgcctcgctgctggtagcctttaccggcagccagggcggcggtcagctgagcccggtgcgcctcactctcgccggggtcgcccttgcggcggtactcgaggggctgtccaacggcatcgccctgctcaacccggacgtctacgatcagctacgcttctggcaggccggttcgctggatatccgcaccctgcaaacgctgaaaattgtcctgctgccggtagtggtggcggggatcgccgctctgctgctgagccgggcgctgaacagcctgagcctgggcaacgataccgccaccgccctcggcagccgcgtcgcccgcacccagctgatcggcctgatcgtcatcaccgttctgtgcggcagcgccaccgccgtcgtcggccccatcgcctttatcggcctgatgatgccgcatatggcgcgctggctggtgggggccgatcatcgctggtcgctgccggtcaccctgctcgccaccccggccctgctgctgtttgccgacgtgattgggcgcctgctggtgcccggcgaactgcgggtatcggtggtgagcgcctttctcggcgcgccggtgctgatctggctggtgcgccgccagccgcggggaggtggcctgtgattgctccgtcccgccgcctgatagccagttgccttctgctgatggccgccagcctgctgatttccctgctcgggctggcgcaaggtccggtgcccctgacgattgaccaggtgttctcggcgctgttcggcgatgcgccgcgcaacgtcgcgatggtggtgaacgaatggcggctgccgcgggtgttaatggcgctgctcattggcgccgcgctcggcgtcagcggcgccattttccagtcgctgacccgtaacccgctcggcagcccggacgtgatgggctttaacaccggcgcctggagcggcgtgctggtggcgatggtcctcttcggccagaacctgacggcgatcgccctggcggcgatggccggcggggtgctgacctcgctggtggtctggctgctggcctggcgcaacgggatcgaaaccttccgcctgatcattatcggcatcggcgtgcgcgccatgctggtggcattcaacacctggctgctgctgcgcgcctcgctggagaccgccctttctgcgggcctgtggaacgccggatcgcttaatggcctgacgtggggtaaaacctggccgtcggcgccgctgatcctgttgatgctggtgggcagcgccctgctggttcgccggatgcgactgctggagatgggcgacgataccgcctgcgcgctgggggtacaggtcgagcgttcgcgcctgctgctgatgctggtggcagtggtgctcaccgccgcctcgacggcgctggccgggccgatctcatttatcgcgctggtggcgccgcatatcgcccgccgcctgagcggcacggcccgctggggactgacccagtcggccctgtgcggcgcgctgctgctggcgctggccgattacggcgcccagcggctgtttatgccgtggcagctgccggttggcgtgttaaccgtcagcctcggcggtatttaccttattgcattgttgattcaggagtcccgcaaaaaatgagtgctgtcccctcccgtttgcgcggcgagcagttaaccctggcctacgggaacaagaccatcgccgagtcgctgaacgtgaccatccctgacggccacttcaccgccattatcggccccaacggctgcggcaagtcgacgctattgcgcaccctcagtcgcctgatgacgccggccagcggccacgtctggctcgacggcgcgcagatccagcagtacgccagtaaagaggttgcccgccgcatcgggctgctggcgcagaatgccaccacccctggcgatatcacggtgcaggagctggtggcccgcgggcgctatccgcaccagccgctgtttacccgctggcgcaaagaagatgaagaggcggtgaacaaggcgatgcgggcgaccgggatcagcgatctggcgctgcagagcgtcgacacgctttccggcggccagcggcagcgggcgtggattgcgatggtgctggcccaggagacggcgattatgctgctggatgagccgaccacctggctggacatcagccatcagatcgacctgctggagctgttgagcgagctgaatcgcgagaagggctacaccctggcggcggtgctgcacgatcttaaccaggcctgccgctacgccacccacctgatcgccctgcgcgacggcaggatcgtcgccgagggggcgccgaaggagatcgtcaccgccgatctgattgaacggatttacggtctgcgctgcacgatcattgaagatccggtggcgcatacgccgctggtggtcccgctgggccgccggtaatctcctctttccccggcttgcgctacgctgagccgggctacctgctgtagcccgaactcaaccgttaccccagaatctccctgaccaccggaccgatggcctcaaaggcctgcggggagatgatatcgacgtgggcgcagttctggctgaacacctccagttcccccacccacgggccccatacgacctgcggatccatcccctcctgccgcgtcttctccgccacgaacagcgtcgccttgccgtcaaacttcgcgctgtgggcagtagttaacagccgcaccgcatcggcatagttgccttcgatagcgctgaacagctcgccggaggcttgcccctgctgggcggcgaggaacgcttcgcgctcgcggtcgatctccgccagtacctcgggatccagcccgttggcctctttctccgcccagttttgcgtctccggcggccaggtatccagcaggccgaggaaggccaccgcttcgccgcgctggcgcaagcgggcggcaatcccctgggctaaggtgccgcccagcgaatacccgaacaggtaataagggccgtgcggctgctgcgccagcagcgtgcgcagatgatgctcgcacacctcgtcgaggctggcggcgctggccatcggcccctgcgggcgcggcgactgaataccggtaatcgaccagcgcgggctgagatagcgcgccagcacgctgaactgccaggcgaagccggaggcgggatggaagcagaacagcgtcgggccgtcgctctcgcgcagcggcagaagcgtatccagccccaggcgctgggcctgctcatcgctgagatcggcggccagcagcgcgctcagtttgcccaccgtcgaggccaccatcacctgccccggggtcacctgccgcgccagctggcggctgagctgtgccgccaggcgcatcgccagcagcgaatgaccgccaagggcgaagaaatcggcgtcgatatcgttcacctcgcagcccagcagctggctgaaggcggcggcgacaagagtttccatgccgggctccggcggccggccgctgcgctcgccgccgagggtcggcagcggcagcgctttgcggtccagtttgccgttggcgctcagcggcagctcagcgagctgcatcagcaccaccggcaccatatgcggcggcagctgttccgccagccgcgctttcagcgccgcggtatccagcggcaggccggagtcagagaccagatagcccaccagctgtcgcgcatcaccgccggtcgccgccgcctggttgaagacgcaggcgtgactcaccgcctgccccacgtccggcagggccaacatcacccgatcaatctcgccaagctcgatgcgctgcccgcggatcttcagctgatcgtcgctgcggccaaggtactccaccgcgccgttcgtcagccagcgcgctacgtcgccggtgcgatacatccgctcgccgggggcaaacgggtcggcgataaagcggctggcggtgagatccgggcgccccagatagccctgcgccagctggataccggtgagataaagatcccccgccacccccggcggcaccgggcgcatcgcggcatcgagaatgcgcagcccggtgttccacaccggccagccaatcggcacgctgctgccggtcaccgccgccagctcagatccgcaggccgggtaccagctgacgtccaccgccgcctccgtcgggccgtacaggttatgcagcggcgcgccggttaagcgctcccactcgcggcacaattccgtcggcagcgcttcgccgctgcagaatacccgccgcagcgtgcggcaggcagcgacgctgtcggcatccagcgaggcgacaaacgccgccagcatcgacggcacaaagtgggtggtggtcacgccgtagcgggcgaagaactgctgcatcgcctgcgggtcgcggtgcgcctccggctcggccatcaccagctgcgcgccggcgataaacggccaccagaattcccacaccgacacgtcgaaactgcacggcgttttctgcgccaccacgtcgtcggcagataacggatagcgatcctgcatccacagcaggcggttgacgatggcggtctggccgaccatcacccctttcggccgcccggtggagccggaggtaaagatgatgtaggcggtatggtctggttttgaaagcgccagcggcgcctcatccccggcggccagcggctgctggtagcagaggctttccagcccggggatatcgctgaagcgggccagttgatcctccgtggcgatcagcagcgacggccgggcgtcttccagcatcatccgcaggcggtcgtccgggtagccggtgtccagcggcagccaggcggcccccgcttcgacaatgccgtgcagcgccagggtcaggaacaccgagcgcggcagggccaccgccacgctgtccccaggcttcacgccgcgctgacgcagcagctgcgcgagcgccaccacctgctgacgcatctcgcgatagctgaactgccagcgggcgtccgccagcgccggcgcatccggggtcttccgcgcctggtcggccaccagcgcgctgagggtggtggcaggcagcggcacagcggtatcgttgaccgccgccagccgggccagctcgtcggcggagagcatctctgcttcgccgcagcgcagcgtcggatcggcggcgaactgcgccagcagcgcggtcagtcgcgccatgtggcgacggagctcggcttcgtcgtaccgggccttgttggcgaggatttccagcgacagcccgccggtctcatccgggaacagcgccagctcgagatcgttgaccgggccggtggcgagggtgtgggtcactgcctgcacaccatcgatatccagctggtaatcaaagactttgacgttcagcaccgggccgaacagcggttcgtcccctgccgctttgccgctgtcgcggacgatctgttcggcgtcatagcgctgatggcggcgcatctttttcaactgaccggcgaggcgcatcgccaggtccgccagcgtctcctgggcgtcaatatgcaccgccagaggcaggacattgagcaccggccccgtcgaggtcagcgcggctgaacccatccggcgcataaagataaagcccgccgcgtagtccatccggttgcacaggcggcccagccacagcgtggtgagcgccagcgccaggtcagcgggctgacactgcggcgcatggccagccagacggcggaaggcgtcggcgttcatctccagcttcatccgccagatatcgctcccggcggcgcgcccgcccagtggcgcggcagagagtgaggctggcgccggtaacgcctggcgctgggcctgccagaaagctttatcccgctgccaggcctcgctgccggcgtagcgctggtactcgtccaccacctcggcgaagggggtgaaaggcgactcaggagtggcttccccacgctgccaggcgcggtaaatggcggcgatctgccgggttatcgccgggaagctgaagccatccaccagcaagtggtgataacgctgataccagtaccagcggtcgtcgccgacgcgcagcagctgatggcacaccagcgggttgccgccgtcgacgcgcagatcctgcgccagatccgcctgcatccgctccgtagcggcgcgatgcggatccggcgccgtccgcaggtcaatgatcgacggttcggcaaaggtgcggtcggccgccagccactgccagacttccccctcctcttcctcaaagcgcaggctgagggtgtccgcctgctgcagaccggcgacaatcgcttttcccagcagcgtcgggtcgagggcgccgcgtagttcaacatagtgggccacgctccaggcgcctggcagagtggagaggcgctcggccatccagatccccggctgcgcggcaaccagcggtaaacgagtggtcattgtcagctccttatgacgcatgatgggcgggggtcagggttgaccagttggccgccagccaggcgttgcaggcctcggccgactgcggggggcacaccaccgtccagccggcaggcaggtcgcagtgcgccggccacaggctgtactgctgttgatcattgcgcagaatgtaaaactgcccttgcggattgtcgaaggggttactgaattgcatatcaaactcctgtcgtaaagcgcgatgctaagggtgcgacagcagaggctgccagagctggataagccctgccgtcagcccgccgcgccagcaaagcgcatcatgcccgccgtcaacctgacgccagaaaatcgtctgctgtgttgtggtgagttgcgccagtagcgcctggttcgcgcgaaaaataatcggttcgcgttggcccgcttccagccagacgcgcagcccggccgcggacacctcaccctggcgaagctgttcgccgataaagcccgtcccgcggccatcgcggtgcggccaccagtaggagcctgactggctgagcacgcagccaaagcgctgcggccagttgagagcggcgaacatcgccgccagaccgccgaagctttgcccggccaccaccgtccgatccgggcggtcgctgaacggggcatagccgtggaccagcggcaggagctcctcctgcaccgccagccagaaatcgcggtgacagggcagctcaaccccgcggcgctggttgtcgatcgcgtcgatcagcaggtagaccgccggcggtagtctcccctcgcgggtcagggcggccagcggcgaccacaccggcatgctctcggcccagaactggccgtcgagcaggatcgccagcggccgcgtttgcgggtcgacagcctcgccggtggtgtagatccagacccggcgatggttgcccagacgcgcgctgcgccactcaaggcaacgggcggcaggatgcgcctcattaagcgggtcccagccgggctgcgcgggggcctgcggcatctccagggcggacacgccatggccgcgtccgccccgccagctgtgcgggttcagcggatcggctatcgcccgcggcagcagtttgcgccagccttcgcgtagcagcgcgcggtcgggcgcatcagcgctgaacacctcaggggaaaaatcatcgtcacggtcggagggaataaaacagtagctgccgcgccaggtcggcgacagcgtagtgcgccagaaccaggcgtcggtcccggggagacgttgcagcgattgcggacgcgcattctgatggtggtcggtcacgccggtgatatagagccatacccgacgatggggagagcgggtttcatcccccgccgggtcccgccaccagaacgttacctcgatggcgtcatccactgcgcggcactgcggcccccgcagggtttgccaccactcctcgcttcctgtccttaacattctgtcattaaccctatgtatagcgtgacttttttaattaattgtcattatttattgataatattattgataactatttgcatttgcaatagcgtattagcgcgccgtgggaagcgcgtctttcatcagaacatgtcaaatcgggcttattcagccagcgacggagtgcctttgcccgcttttggcaacatttatgccgcctcccctcccggtgggaaggggcgtttggggaacgtggcgacaaaaagcaggaataacaatgaataacaggatcaaatccctggccttgctggtcaatctgggaatttacggggttgcttttccgttaagcgcagcggaaaccgccaccgacgataaaaacagcgccgctgaagagaccatggtggtcaccgccgccgagcagaacctgcaggcgccgggcgtctccaccatcaccgccgatgagatccgcaaacgccccccggcgcgcgacgtctcggagatcattcgcaccatgccgggagtcaacctgaccggcaactccaccagcggccagcgcggcaacaaccgccagattgatatccgcggcatgggcccggaaaataccctgatcctgatcgacggcaagccggtcaccagccgcaactccgtgcgccttggctggcgcggcgagcgcgacacccgcggcgataccagctgggtgccgccggagatgatcgaacgtatcgaagtgattcgcggcccggccgccgcccgctacggcaacggcgccgccggcggcgtggtgaatatcatcaccaaaaaaaccggcgatgagtggcacggctcatggaacacctatatgaacgccccggagcacaaggatgaaggctccaccaaacgcactaacttcagcctcagcggcccgctgggcggcgatttcagcttccgcctgttcggtaatctcgacaaaacgcaggccgacgcctgggatatcaaccagggccatcagtccgaacgtaccgggatctatgccgacaccctgccggccgggcgcgaaggggtgaaaaacaaaaacatcgatggtctggtgcgctgggaattcgctccgatgcagtcgctggagtttgaggccggctacagccgccagggcaacctctacgctggcgacacccagaacaccaacaccaacgacctggtaaaagagaactacggtaaagagaccaaccggctgtaccgcaacacctactcggtcacctggaacggcgcctgggacaatggggtgaccaccagcaactgggcgcagtacgagcgcacccgcaactcgcgcaaaggcgaaggcctggccgggggcaccgaggggatctttaacagtaatcagttctcggatatcgatctgtcagatgtgatgctgcacagtgaagtcagtatcccgttcgactacctggttaatcagaacctgacgctgggcagcgagtggaatcaacagcggatgaaggataacgcgtccaacacccaggcgctgtcgggaggcgaaattccgggttacgacagcaccggccgcagcccgtactcgcaggcggaaatcttctcgctgttcgccgagaacaacatggagctgaccgacaccaccatgctgactccggcgctgcgtttcgatcatcacagcattgtcggcaataactggagcccgtccctcaacctgtcgcaggggctgtgggacgacttcacgctgaagatgggtatcgctcgcgcctataaagcaccgagcctgtatcagaccaacccgaactatattctctacagcaaaggacagggctgctacgccagtaaatccggttgctatctgcagggtaacgacgacttaaaagccgagaccagcatcaacaaagagattggcctcgagtttaaacgcgacggctggctggcgggcgtcacctggttccgcaacgactatcgcaataagattgaagcgggctatgccccggtctataccaacggcagcggcactgacctctaccaatgggaaaacgtgccgaaagcggtggtggaaggtctggaggggacgttgaacgttccggtgagcgagaccgtcaactggaccaacaacatcacctatatgctgcagagtaagaacaaaaagaccggcgatcgtctgtcgattatcccggaatacacgctgaactccaccctgagctggcaggttcgcgatgacgtttcgctgcagtcgaccttcacctggtacggcaagcaggagccgaagaagtacaactacaagggtcaaccggtcaccggcagcgagaagaacgaggttagcccctacagcatcctcggcctgagcgcgacctgggacgtcaccaaatacgtcagtctgaccggcggcgtggataacgtcttcgacaagcgccactggcgcgcgggcaacgcccagaccaccgggggcgccaccggctatatgtatggcgccggcgccgagacctataacgaatcgggccgcacctggtacctgagcgtcaacacccacttctgatagcgggttctccctcccccgcccttgctggacaaagggcgggggcaaccgcggtaaccttatcctatgcgccaccatcgcaccgttttgcctctggccggctataccatccagcagatcgacttcgacccggcgactttccagcctgaagatctgttctggctgccctatcacgccagcctgaccgggtggggccgcaagcggcaggcggagcacctggccggacgcatcgccgcggcatacgccctgcgcgaggtgggggagaaacggcttcccgccatcggcgaccagcgccagccgctgtggcccacgccctggttcggcagcataagtcattgcggccagcgcgcgctggcggtgatcgccgatcggccggtgggcgtcgatatcgagcgccggtttaccccacagctggccgcggagctggagagcagcattatcagcccggcggaaaaaacggcgctgctgcacagcggcctgcccttcccgctggcgctgacgctggcgttttccgcgaaagagagtgggtttaaggcctgccatcccgacgtacaggcgggcgtcggttttaacgattttacgctggctgcaataaaggaaggaaatctgcgtcttcggctctccaccgtggagtatcggctgcaatggattcaggcaggggaatacatcatcacgctctgcgcgccgtaaaaaaacccgcgcggcataccgcacgggttatcggttttagacggcgaaaaatcagcgcattttctgcgccagctccgcgacggaagcggcatcgaaaccgtggtgtttacgcagccagccgcgatctgccgccgccgcatactcaccatccgggatccccagacgtttgagcgggatacccaccccagcctcagccaatacttccgccaccaggcttcccaccccgccgttgacgttatgctcctccaccgtaatcaccgctttgcacggcttcagcgccgccagcagcgcggcggtatcgcaggggcgaagagatggcacgctcaccactttggcctgaatccccgcgtcggccagcatctgcgccgcatcgacgatctcatgcaccgtcgagccggtggccaccagcgcgatatcatcgccttccctcagcgtgacgatcgcgcccggtacaaagcgatagctttcatcgtgcagttccggcagcgccttgccatcgaggcgaatatagaccggcccctgataaccgatggcgtaatcaataatctgccgacattcgcgcggcgaggacggggcgaaaatctggatattgccaaagccgcgcatcaccgccagatcgtcaatggcatggtgggtgctggccagcgggccgtagctggctccagcgttaaggccaaacagcttgacgttggtgttgttgtaacagacatccactttgatttgctcattggcccgcgagataagaaacggcgcagcgttacaggtcaccgccactttgccgcccagcgccagaccggcggcggcgccgaccatgctctgctcggcgatgccgacgttcaccagccgaccgggaaactgcttaataaagggggcgattttagccgtcgacgtggagtcggccaccaccggcaccagatcgacaccgctttccacggcggcgataaaggcctcgaccatgacgttagccaggtgttctgtattactcatctttcagttcctccagcgccagagcgatctcttcgcctttcggcacccggtggtgccactccgggcgcccctggataaaggaaataccggcacctttcgtggtgttggcaataataacgttgggtttaccttcctgcttcaacccctcgatgaccgagaccaccgaggccatgtcgttaccctggcattcgctgacttccataccgaaggcgcgccatttatcggccagcggatcggtattcatgatttcgcgcgtcggcccggccagctggaggttgttcttatcattaataatgaccagattatccaggccgtaatgtgcagccgccagggcggcttcccagttactgccttccgccagttcgccgtcgccggtgatcaaaaaaatgcggcgggtgctgttgcttttcttcgcggccagcgccagccccaccgcaacaggcaaaccgtggcccagcgcgccggtgttgagctcgatgcccggcgttttttgccgcaccgggtggccggggagatgggaattggcatgctggtaggtctccagccactcgaccgggaagaagccggcttccgccaggacgcagtagtagcagcccacggcgtggcctttcgactggatgtagatatcgcgctgcgggtcgtcgagccggtccggcgcgacgttaaggacgcggaaatagagcgcggttaacagttcgacctgcgaaaggtcagccccggtgtggccgccggccggactattggcgtttaagcgcacaatatggcgccgcaccgcgcgggctttacgctccagcgtctgaatatcatatctgtagggattcatttcacacctctgaatttattttcagcatggaatatttattccagcaaggactaaaaaaaccagatatccctatgccgggtggtaagccttctgccacagcgccctactcaggaacattctgcctcccgctccaggcgaagcccggataaacacattgactcgaaatcgccttgaatatatattcaataatgattctttattcgattatggcctggctgttttgtttttgtccatagtcgattttgaggattggcaaaagttagacgcctgtcacacttaagtctgattttttttcgcgtatgataaaagtcactacgataatggctgcagctaaccgcctgaagaaaggcgataaatgattttcgaggattaatatggctaagcaggatgaacaacggctattggttaagattgccacgctttactatctggaaggacgaaagcagtctgatatcgcccaacttctctcgctgtctcagtcatttgtctcccgcgccattacccgctgccagaaagaaggcgtcgtcaagatcagcgtcgttcagccgtccaacatctttctgaagctcgaaaaagggcttgaggatcgctacggccttaagcaggcggtggtggtggataccgaggaagaggccagcgatcataccatcaagcgggcgattggctccgccgccgcccactatctggaaacccggctgcggccaaaagatctgattggcgtctcctcgtggagctcaaccattcgcgcgatggtcgatgaagttcatgcgcaaaacctgaaagccagcggcgtgatccaactgctcggcggcgtcgggccaaacggtaacgtgcaggcgacgattcttacccagaccctcgcccagcgcctgaattgcgacgcctggctgctgccgtcacagagcatcgaaggatccatggaggagcgcaaccggctgctggccagcaaagacgtcgctgacgtggtgtcgcgctttgatgaagtggatatcgccatcgtcggcatcggcattctcgaaccctctcaactgctgaaaacctccggtaactactatcacgaagatatgctgcaggtgctggcggcgcgcggcgcggtgggtgatatctgcctgcactactacgacaaaaacggccatccggtgttacgcgatgatgaagatccggtgatcggtatggcgctggagaaggtcaaaaaatgcccgaacgtggtcgcgctggccggcggtaccgacaaagtcgcggccatcaaaggcgccctcaccggcggctacattgatgttttaatcaccgattaccctaccgctcgcatgctggttagcgactaacctgccgcgctgcttttcctctctgccgccctgacgtgcttttttagcttcagggctggctctgttaatacatttaaattcaatcagttaatcaaccactccagccgcctatcgccgctttcgccgatcggcgaaatgtgattgccagcacaattgatgatttttccggtagcccgtcaccgggtttgtggcttaaggtatcaaataaataatcactatcgaatatatattcagtgattaaaaagatgataatgaaatgtcacaacatggcctgcacagacgcaggagacggtgggagatattcctcgtcttcgcggttccaggacaccgagtgaccgaggagagcacgatgcaggcgacagcaaaagagttcatcattgccctggatgaaggcaccaccaacgccaaagcggtggtgctggatagccggggcaaagttatcgtcaaattctcgcagccgctggcgatccaaacgccgcgcgacggctgggtggagcaatcgggcgaagcgctggttaccgcctcactgacggtgatcgccagcgcggtggcccacgttggcgcggaaaacgtcgccgcgctggctatcagcaaccagcgggaaaccgccatcggctggtatcgcgacagcggcgaaccgattaacgcggccattacctggcaatgcacccgcagcgccgcgttctgcgacacgctgcgtcacgatcgtcaggaacagcacattaagcgtgccaccggcctgccaatcgccccgctgttctcggcctccaaaatgcgctggctgctggatgcgactgtcgatggccgcctgcgcgccgaacgcggtgagatttgcctcggcaccatcgacagctggctgctgtggaatctgactgctggagaagccttctgctgcgactactccaatgcctcccgcacccagctgctgaacctgcaccgcggcgagtgggacgacgagatgctggcgctgttcggcattccgcgcgcggcgttgccggaaattaaaccgtcgagcggcctcttcggccataccaaaggactggccgccattccggacggtattccgatcatgtcgatgatcggcgactcccacgccgcgctgttcggccacgcgctcggcgaggcaggctgcgtcaaagccacctacggcaccggctcttcggtcatggccccggtcaaatcggcgcagtgcgatatcgacgcgctggcgaccaccgtcgcctggcacgatggcgaccagctggtgtggggcctggaagggaatattccccacaccggcgatgctgtcgcctggatggcggacagcaccggactgagcgaactctctgccgccgagctggcccatgagctgaataccctccccgcctccgtcgactcaaccctcggggtctacttcgtgccggcgctgaccggtcttggcgcgccctggtgggatgacagcgcccgcggcgtgatttgcggcctgagtcgcggggtgaaacgcgcgcatctgatccgtgcggcgctggagtccatcacctatcagatagccgacgtggtggtggcgatgcgtcagcatgaggagttcaccctgacggcgttgatggtggacggcgggccgaccaacaatgactggctgatgcaataccaggccgatctgctcggctgcccggtgatgcgcagcgacgtgccggagctgtccgccatcggcgcggcgttgctggcacgcaaagcgctccatccgggatcgaccgccgatctgcaggccttcttaaccgaacatagcacctttcagcccgacatggcccgccaccagcgcttacaaacgcgctggcaggagtggcgccatgcggtcgaccgaacattatggaaaccggactcgccagcctgaccgccagactgcgcgacgacacgcattcacttatcacaggagaaacccggcccataacgatatcgctatccccgaatacatcaggggaaatttcagaccgtaaaagcctgcccgctcaggggctcatttgttcgaatataaaaatacaggaacagagtcatgaaattacgtataacccttttaaccgctgctaccctgaccgccttctcctttgccgcgcacgccgcggagaaaggcaccattatgatcatggtcaactcgctggataacccgtattacgcctcggaagccaaaggcgccagcgaaaaagcgcaagctctcggctacaaaaccaccgtgctgtcccatggcgaagatgtcaaaaagcagaatgagcttatcgacaccgcgattggtaaaaaagtgcagggcattattctcgataacgctgactccaccgccagcgtcgccgccgttgaaaaagccaaaaaagcgggcattccggtggtcttaattaaccgcgaaattccggttgatgatgtggcactggaacaaattacccacaataacttccaggccggctctgaggtcgccaacgtcttcgtcgagaaaatggcggagaaaggcaaatacgccgagctgacctgcaacctcgccgataataactgcgtcacccgttctaaatctttccatcaggtcattgaccaatatccggatatggtcagcgtggcgaaacaggatgccaaaggcaccctgatcgacggcaaacgcatcatggacagcatcctgcaggcgcaccccgacgtgaaaggcgtcatctgtggcaacgggccggtagcccttggcgcgattgcggcgctgaaagcggccaaccgtagcgatgtgattgtcgtcggcatcgacggcagcaacgatgagcgcgacgccgtgaaagccggcaccctgcaggcaaccgtgatgctgcaggcgcaggccatcgccgctcagggcgtcaccgatctggataactacctgcaaaaaggcgagaagccggcgaagcagcgcgtgatgttccgcggcattctgattactcaggataacgccgataaagtccaggatttcaacattaagtcctgagttcgggtggttgcgcccctgcgggggcgcagaggagagcattatgtttaagaaaacctgtctgacgctggccgtactggcgctagggggctgtcgcatcgtctcgcagcaggagctggcagacctgaaatccccgcccaacccgcatatggcgaatatggataaaacctggcagcagagcatcgtaccgcaggtggtgacgaaagcgcgtccggcggcggaactgatgagcgcgctcaaggcggcaaaagacattgatagcgcctgtaaaaccctcggctaccgtgcgcaggatgaaaacccctgcatcttctacgtcaaggtttcaggtaccgtcagcaaactcgataccgcctcgcgcagcggcaaaatgaccttgaccgacgccagcgtcgggaaggtgacggtgcagattggccctaccctgcgcggcacccagctacgcgacggctacagcggcgccagctatcaggactttaatgaccaggtgctgttcggcgagtacagcaagaatatcaacagtcaggcggtcaaaatgattcagacagccaacgtcaaaaccggcgacagcgtggaggtgtacggcgtcttctcggcctgggatattccacaaactctcccggaaattaccccggcgaaaatcattcatgcagggggacaataatatggcgccgcacgatctcgtcgctccccagcccgttgagtccgaagtgattatcgaaacccgcggcctgtcgcgcgtctatcccggcgtaaccgccctggataatgtcaattaccgggtctatcgaaataaggtcaacgtgctaatcggagaaaatggtgcgggtaaatccaccatgatgaaaatgcttgccggtgtggaaacgccctcctccgggcaaattatcctcgatggtgaagcagtttcattacagtcgacgcatcaggcagaaaaactgggcatcagtattatttttcaggaactgaatttatttcccaatatgaatgtgatggacaacatcttcatggcgaatgaattctttcagaaaggacgcattaacgaaaaataccagtacgcgctggccaaatcgctgctggaacggctggagctggatgtcgatccttacgctccgctgggtgaactcggtatcggccaccagcagttagtcgagattgcccgcgccctgtcgaaagacacccgcgtgctgatcatggacgagcccacctcggcgctgagccagtctgaggtcaaagtgctgttcaaggtgatcgcgcagcttaagcggcgcggcgtgaccatcatctatatctcgcatcgcctcgaagagctgatggagattggcgacaacatcaccattttccgcgacggtcgctttatcagcgagcgtcacgtcagcgacgccagcgtaccgtggatcatcgagcagatggtcggtgataagaaaaaacactttgattatcaaccggcgccaaaaggcgacgcagtgcttgacgtcaaagggctgaccgcgctgcatcccagcggcggttacaagctcaatgacgtcaccttcaccctcagcaaaggcgaagtgatcggtatttatggcctgctgggcgccgggcgcaccgagctgtttaaaggcctggtcggcttgatgccctgccagcgcggcgaggtgcatcttaacggcgaaagcatcggcaaatctcgctttcaacagcgcctgaaaaaggggctggcgctggtgccggaggaccgtcagggcgaaggcgtggtgcagatgatgtcgattcaggccaacatgacgctctctgatttcagcctgcaggggttccgccgcgcctggcgctggttgaacccgcaaaaagaagagacctgcgtgaaagagatgatccagcagctggcgatcaaggtcagcgacgccacattgcccatcacctcgctgagcggcggcaatcaacaaaaagtggtgctgggtaaagcgctgatgacccagccgcaggtggtgttcctcgacgaaccgacgcgcggcatcgacgtcggcgcgaaaaccgacgtctatcacctgatcggcaaaatggctcagcaggggctggcggtgatgttctcatcttcggaactggatgaggtgatggccctggccgaccgcatcctggtgatggccgatggccgcattaccgccgatctaccgcgtcacgcggtgacccgcgaacagttaatcgcggcttcaacacctcaagattaatcaggctggaatccatcatgaaccagaaatatatgatttatatgtacctgctgaaggcccgcacctttatcgccctcctgctggtgatcgcgttcttcagcgtgatggtacccaacttcctgaccgcctctaacctgctgatcatgacccagcacgtggcgatcaccggcctgctggccatcggcatgacgctggtcattctcaccggcggcattgatttgtccgtcggcgcggtggcggggatctgcggcatggtcgcgggcgcgctgctgaccaacggcctgccgctgtggaacggcgatatcctcttctttaatgtcccggaggtgatcctctgcgtggcgatcttcggtgtgctggtcggtctggtcaacggcgcggtgatcacccgcttcggcgtggcgccgtttatctgcaccttaggcatgatgtatgtcgcccgcggctccgcgctgctgtttaacgacgggagcacctacccgaatctcaacggcatggaagcgctgggcaacaccggtttcgccaccctcggatccggcaccctgctcggcgtctatctgccgatctggctgatgatcggcttcctcgtgctgggctactggctgaccactaaaacgccgcttggccgctacatctacgccatcggcggcaatgagtctgccgcccgcctcgccggcgtgccgatcgtgaaagcgaaaatattcgtctatgccttctccggcctgtgcgcggcgtttgtcggcctgatcgtcgcatcacagctgcaaaccgcgcacccgatgaccggcaacatgtttgagatggacgccatcggcgccaccgtgctcggcggtaccgcgctggccggcggccgcggccgggtgaccgggtcaattatcggcgccttcgtcatcgtcttccttgccgacggcatggtgatgatgggcgtcagcgacttctggcagatggtgattaaaggcgtggtgattgtcaccgctgtggtcgtcgaccagttccagcagaagctgcagagcaaggtcatcctgatgcgccgccacgaggaaaaactggccgccatcccccccaacggcgccacctccagctaaccggcaacgattcacatcttccgccgggcctggtgcccggctcagcgaaagggaaaaaatatgcaacgagatttccagaacaaaacggtggtgatcaccggcgcctgccgcggcatcggcgcaggcattgccgagcgctttgcccgcgacggcgcaaacctggtgatggtctccaacgccgagcgcgttcacgagaccgccgaaacgctgcgtcagcgctatcaggcggatattttatcgctgcaggtcgatgtcaccgatgaagcccaggttcaggggctatatgagcaggccgccgcccgcttcggcaccatcgacgtctccattcagaacgccggggtgatcaccatcgattactacgaccggatgccaaaagccgatttcgaaaaagtgctggcggtcaacaccaccggcgtgtggctgtgctgccgcgaggcggccaaatatatggtgaaacagaatcacggcagcctgatcaacacctcttccggccaggggcgacaggggtttatctacacgccgcactacgccgccagcaaaatgggcgtgatcggcattacccaaagcctggcgcacgagctggcgccgtggaacatcaccgtcaacgccttctgcccgggcattattgaaagcgaaatgtgggattacaacgaccgcgtgtggggcgaaattctcagcaccgagcagaagcgctacggcaagggcgaactgatggccgagtgggtcgaagggatcccaatgaaacgcgccggtaagccggaagacgtggccgggctggtggccttcctcgcctccgacgacgcgcgctatctcaccgggcagaccatcaatatcgatggcggtttgattatgtcgtaatccccgcgggttagcgggtcccatagcccgaataaggcgtcccgaattggcgctaccactccgggacggccccccggtggcgctacgcttaccggggctacgtaacaccgccgaaaggtagcccggataaggcgcggcgcaccaccatccgggaagccaggctcccgacgttcgacactatattgaagagaataatcattatgatcggtaaagactttgcacaacacctatttagcctgcgggatcgcgtcgccttcgtcaccggcgccggcagcggcatcggacagaccatcgcctgcagcctcgccagcgcgggtgcacgggtagtctgttttgatcttcgcgacgacggcgggctggcggaaacggtcagccatattgaatccatcggcggtcaggcttgctcttataacggcgatgtccgccagattgccgacctgcgcgccgccgtcgcgctggccaaaagccgctatggccgcctcgatatcgccgttaacgccgccgggatcgccaacgccaatccggcgctggagatggagagcgagcaatggcagcgggtgatcgatatcaatctcaccggcgtatggaactcctgcaaagcggaagcggaactgatgctggagtccggcggcgggtcgattatcaatatcgcctcgatgtcggggattattgttaaccgcggcctcgaccaggcgcattacaactgctccaaagccggcgtgatccatctgtcgaaaagcctggcgatggagtgggtgggcaaagggatccgcgtcaattccatcagtccgggatataccgccacgccgatgaatacccgtccggagatggtgcaccagacccgcgagtttgaaagccagacgccgatgcagcggatggcgaaggtggaagagatggccggcccggcgctgttcctcgccagcgacgccgcctcgttctgcaccggcgtagacctggtggtcgacggcgggtttgtctgctggtgatcctctcctgcttcagggcgccacgctgcggcgcccctctccacccctgccgttaacccaggggatactgttgaaacgccggcagcgcctctcccttctccgccagcgcgcgaatatgcggaaacgccgcggccgacaccaccgccgggatcatcaactggataaaggaccagaccaccgtgctggtgaccagcacctgatccggctgcgcggcggcggcgcggtctgccagccgggcgtcccactcccgacaggcggccagcagttggccggtcacccgggctacccacggctgatgctgcttctcttccggccgcagacggtgctcataaacatgctggaccgctttttcacaggcggcgaggatcacccccagcaggtgcagatcgcgggccagcgcctcgggatgcgcgggaagcagccggcgcccggccggattggtcgtttcgaaatagtggaggatcagcgtggagtccatcagctgcgtcccgttatcgagcaccaccgtcggcgccttgaccaccggattaatgcgggaaaattcgtcaaagccgctaaagaccgatagcggcaggctctcgaattccacgccatagagcgccagagaaaccgccacgcgtcttacataaggtgaatccatcataccaatgagtttcatcgtcactcctgcctgcgataaaggggttgcggctttaccttactggaaaaccgatgccgcgaatatcacgggatacttaccgcaatggttagtcaaactaacagattggagattcgcggtagccctccagttccccttgtgctataccgactgaggcggcatttggctccttttcagcttgtttgcagcggctttaaaagccgctaacccggtagtaacgttaacgtatcgactcactgacagagaaaccaccatggcagattttccccctgtcgccagcctgcgcagctttgaggcggtggcgcgcctcggcagcgtaacgcaggccgcccacgagttgagcgtgacccattcggcggtcagccagcacatcaaacagctggaagccctggtcggcgtcacgctctttatccgccacggccgcggagtgcgcatcacggaagaaggacggctctatgccctgcaaatccgcgaggcgttacagcacatcgccgacgccacgcgcatggtgcagatcaaaccccgcaccctggaagtgaccctggcgacgctcccctcctttggctgccactggctgctgccgcggctggcgcgctttcaggcgcggcatccgcagatcgcggtgcgcctgctgaccagcctggcggtggttaacctgcaacaggagggtatcgatctggccattcgcatggggcaaggcgattgggagggaatggaaagccggcatctgtttgccgatgaacagctggtggtcgccgcccccggctatcgcggcggtaacctgccgaccaccccgcaggcgatcgccgccagcgatattattttttccatggagtcctggaacgcctggtgcagccaggcggggctggaaaagccgatcgtcccctcaggcctgcgcctgaacgactccaatctggtgctggaggcggtccgcctgggggccggcgtggcgctggagcggcgctccctggtggcgggggcgatagcccgcggcgagctggtgcagctcaccgccgtcaccgtcccctacccctggcactactggctaaccgtctccccgcaggcggagaaccggccggaagtcgcccggttcatcgcctggctggaggaggagatcgccctctggcgccagcagatcagcgcttagccttcggccgacggcggcaggcccgtccggacggcgtgctcctgggagagacgccagaaatcgtgcccggcgggatactgatagaggcgcagggaaaactgtccggccaccgcggtaatgtactcaaatatcgccgactgggtgttttcgtagtctttccaaagcgttgaggaggtgaagcagtaaatctccaacggaatgcccgagggcgacggtttcagcgttctcgccacaatgtacatctccttaataatatccggccgctcggcgagatagtgcatcagatagtggcgaaacagggtcaggttggtcagcccgttatcgataaaccagcggtcggccacgccgccgggatcccggccgtcaagcagcgtgcccaaaggctcactcaccccgcggatggtcagcatcgaggagagcatctcctggtcgagaaaacgcaccgagtgctgatcgatggcgatactgcgcatgatccgccgcgccccggaggagaacatcgcctgccagttggtataggtctcggtgaggaaattcttggtcgggatacgggagatggtattgtcccagttgcggatggtaatggtgtgcagcgcgatatccgtcacctcaccgctgaggttcttgtcaggcatttcaatccagtcccccagctggagcacgtcgttggacgacagctgaacgttcgccaccagcgacagcagagtatgctggaacacgatcatcagtaccgccgccactgcccccaggctggagataataatgatcggcgatttgttcgacatcacggcgaggatcataatcgccgccaggatgtggactaagattttgcctatctggatatagcccttaatggaatgatttttacgtttggtctttcgcagataggagctgttgacaatatccagcatctcgttgaaaaacaccgacataaaaataaaaaacaagatcccgcagatagtattaatcgccgtcaccagcgatgccggcatcgccggcataaactgcagaacgtaatagatgataataaccggaatgaaattggacagcttttcggcgatacgtcgatccttctccagcggcacatcctgtttgtggctactaaagaagaccttacgcaccactttaatcagcaagaacttgcataaaagatgggcaaatatgccggagagcagcagcagaataagattaaaccccaccgccagcgccggattactctcaataaacgtcagtagatgattcacatacgccatgctttatcgcctgaataactatgccacttcgctaactgctttatcccaagggcatatatttggaaaataaatcaatccgcatcatggcatatcgcttagcgtaacgtccatgcgcgcaccgcttctaatcattcacagaaaatatgtcagagtttgcattaatcattctctacgctcactataaagaggcttgttatgaggacggaataagtccaggaggaaacatgtttaaagctcttaccgctatcgtcgccttagccgcctccgccagcgttatggcgcaaggcgatgtcacgctgaacaatctggctcaagatgccgccacccgggcgtcgtttaaccagatggtcaaaggccatcagctgcccgcctgggtgaccaccggcggcaccggttcgcccgcgcagacggtgaaactgggtagcgaatcctggcaggtgttaagcgcctgcaaaccccacgactgcggccatgaacgtatcgcggtgatctggtcggaaaaaagcaaacagatgtccggcgtttactcggtggtcgatgaaaaaaccgaccaggagaagctgacctggcttaacgtcagcgatgccctgtccatcgatggcaaaaccgtgctgtttgccgccctcagcggcagcctcgacaaccacccggacgcctttaactaccagtaacgaccatcgcccccgtcagcctttccccgacgggggcttccctgattagccatccgggaacatcacgctgttccccggcgcttcccgatgcagatggataaagttcaggtgccgctcgtactggtcgagaatatcggtgatcacctgctctttgctgtagtccatcaggtcgttaccctgactgccctccagcaggaaggtctccagccggtaataggtggatttcccgctgcgcgcccgataggtaaagcccggcaccgagtactgctgcggccagatcttgtagataaagttctgctcgtcgcccatgtgcaccagcagatcgaggtggccaaggttctcaccctcttccggcggcaggctcttcagttccaccgccgcgccgcgcagccgcagctcctgggccacctcctccatcgccgggtagcacaccgtctccatcatcagtttggtatagcgcgtgcccgggtaattcatcagccgcgacaggcgcttcttccagctcagacgatcctggaggcccatcgggcgcggggcggtgtcgcggctggcgctgacccggcggtaatcttccactttcagagatttatacagtccggccatcacgaagaaaatcacaaagctgaacggcagccccatgatcaccgtggtgttctgcagcgccgagatgccgttggtcatcagcatcccgagggtcaacagaccgatggccaccgaccagaagatgcgtagccagttcggggcgtcgctgttgatgtccttcagcttcgaggtgaagttccccagcaccagcgcgccggagtcggcggaggtaacgtaaaacagcagaccggtgatggtcgccaccgacgcgctaaaggtaaacgccggatactgcgccagcaggctgtagaagccgcgctccgggtgggccatcgcctcctgggcaaaggccgcgtcgccgtggatgatctcatacagcgcgctgttgccgaacaccgacagccacagcagggtaaaggtgaagggaataatcagggtgcccatcacgaactggcggatggtgcgcccgcgcgaaatgcgcgccaggaacaggcccacaaacggcgaccaggccacccaccacgcccagaaaaagagcgtccagttgttcatccattctaccggccggtcgaaggcgaagctgttcagcgtcatgcccataaagcgattgacgtagtcgccgacgttgagcactaacgcattgagcaggaaggaggtatcccccatgaacagcacgaacaggatcagccccagcgcgagggcgacgttaagttcggagagcacgcggatgcccttgtccaccccggaggtgaccgagatggtggcgatgatcaccgacagcgcaatcagggccgctttcgccgccagcgagtccggaatatcgaacagcacgctcagaccgtagttgagctgcacgacgccgataccgagggtggtggcgatgccgaagatggtgccgatcaccgccgcaatatcgacgctgtggccgatgggcccattgatccgtttaccaaaaatcgggtacagcgccgagcggatggtgagcggcaaattataacgatagctaaagtatcccagcgccatgcccatcagggcatacattgaccaaccggttaagccatagtgaaacagggtccagaccatcgcctggcgcgccgcctcgatggtctgccccgccccttccggcggctgcatatattgcgtcaccggctcggcgactgagaagaacatcaggtcgatgccgatgccggcggcgaacagcatcgccgcccagctcagcaggctgaactcgggctttgactgctccggcccgagcttcaccgagccgaagcgcgagcaggcaatgcagacgacgaagacgatatacagcgtcgccgccagcagatagtaccagccgaaggttttcgacacccagtcgagggtgcgcccaatccactcggcagaaaaatcgcgaaaaaagatcgtcatcagggaaaacaacaaaatcagtccggccgaggtataaaaaaccaccggattgattttgtccttttctctgctttgcgaaagatctgtcatccagtatccccactgtttttgtaactattaaaatccaaatcagcaacaattaagacacattttatattgaacgtccaatcaaaaaccgctttaatagttaaccaacgctgatgaatggagtggcaaaaatgcccaaactggggatgcagccgatccggcgcaggcagctgatcgacgccacgctggacgcaataaatgaagtcggaatgcacgacgcgaccatcgcgcaaattgcccggcgggcgggcgtatcgacggggatcatcagtcactatttcaaagacaaaaatggtctgctggaggcgaccatgcgcgacatcaccagccagctgcgcgacgcggtgctcaaccgtctgcacgctctgccggacggcagcgccagccagcgtctgcaggcgattgtcggcggcaactttgatgagacgcagatcagcagcgcggcgatgaaggcctggctggccttttgggccagcagcatgcaccagccgatgctttatcggttacagcaggtcagcagccgtcgcctgctgtcgaacctggtgtacgaattccgccgcgagctgccgcgcgagcaggcgcaggaggccggctacgggctggcggcgctgatagacggcctgtggctgcgggcggcgctcagcggcaaaccgctggataaaacgctggcgcagtcgctgaccagccactttattcgtcagcatttaccgaacccataaccgaggaggcgttatgtcccgaatggcagaacagcagctttatattaatggtggttatacatcggccaccagcggtcgcaccttcgagaccatcaaccctgccactggcgaggtgctggcgaccgttcaggctgccggacgcgaggatgtcgaccgcgccgtcgagagcgcacagcgtgggcaaaaaatctgggcggcgatgaccgccatggaacgctcgcgtatcctgcgtcgcgccgtcgaccttctgcgccagcgcaacgacgagctggcgcgactggagacgctggataccgggaaacctctcagcgaaaccgccgccgtcgatatcgtcaccggcgccgacgtgctggagtattacgccggattgatcccggcgctggaaggcagccagatcccgctgcgcgacagttccttcgtctacacccgtcgcgaaccgctgggggtggtagccgggatcggcgcgtggaactacccgatccagatcgccctgtggaaatcggcgccagcgctggccgctggcaatgcgatgattttcaaaccgagcgaagtcaccccgctgaccgccctcaagctggcggaaatttatagcgaagcgggcctgccggacggggtgtttaacgtcctgccagggatcggcgcggaaaccggccagtatctgaccgagcatccggacatcgccaaaatctccttcaccggcggcgtcgccagcggcaaaaaagtgatggccaactcggccgcttcatcactgaaagaggtcaccatggagctgggcggcaaatcgccgctgattatcgccgatgatgccgacctcgacctcgccgccgatattgccatgatggccaacttttacagctccggtcaggtctgcaccaacggcacccgggtgtttgtcccggcgaaacagaaggcggaattcgagcacaagatcctcgagcgggtggcccgcatccgcgccggcgatctgtttgccgacgacaccaacttcggcccgctggtcagcttcccccatcgcgacaacgttctgcgctatatcgagagcggcaaacgcgaaggcgcgcgcctgctgtgcggcggcgaggcgctgaaaggcgacggtttcgataacggcgcgtgggtcgccccgacggtgtttaccgattgcagcgacgagatgaccatcgtgcgcgaagagatcttcggcccggtgatgtcgatcctcagctatgccgacgaagcggaggtcattcgccgcgccaacgccaccgaatacggcctcgccgccggcgtggtgacgcccaacctcaaccgcgctcaccgaattatccatcagctggaagccggcatctgctggatcaacagctggggggaatccccggcggaaatgccggttggcggctacaaacactccggcattggccgcgagaacggcgtgatgacgctgcagagttacacccaggtgaagtccatccaggttgagatgggtaaattccagtccatattttaaccgggaggtttttttgcaatttgactacatcattattggtgccggctccgccggcaacgttctggcaacacgactgactgaagatccaaacaccaccgtcctgctgctggaagccggcggccctgactaccggttcgatttccgcacccagatgcccgccgcgctggcttatccgctgcagggcaagcgctacaactgggcctacgaaaccgaacctgagccgtacatgaacaatcgccgcatggagtgcggacgcggcaaagggctcggcggctcctcgctgatcaacggcatgtgctacattcgcggtaacgcgatggatctggacaactgggccaaagagccgggtctggaacactggagctatctcgactgcctgccctactaccggaaagcggaaacccgcgatatcgggcctaacgactaccacggcggcgatggcccggtgagcgtgacgacgccgaagccgggcaataatccgctcttcgaggcgatggttgaagccggggtgcaggcgggctatccgcgtaccgacgatctcaacggctaccagcaggaaggctttggcccgatggaccgcaccgtgacgccgcagggccgtcgcgccagcaccgcccgcggctatctcgaccaggcgcgcggtcgcccgaacctgaccatccgcacccatgcgctgaccgatcacattatttttgccggcaagcgcgcggtgggcgtcgagtggctggagggagagagcacgatcccgtcaaaagcgacggccaacaaagaggtgctgctgtccgccggggcgattgcctcgccgcagatcctgcagcgctccggcgtgggtaacccggagctgctcaggcagttcgatatcccggtggtgcacgatctccccggcgtgggtgagaacctgcaggaccatctggagatgtatctgcagtacgagtgcaaagagccggtatcgctctacccggcgctacagtggtggaaccagccgaagatcggcgccgagtggctgttcggcggcaccggcatcggcgccagcaaccagttcgaagcgggcggttttatccgcagccgcgcagaattcgcctggccgaacattcagtaccacttcctgccggtggcgattaactacaatggctccaacgcggtgaaagagcacggcttccagtgccacgtcggctcgatgcgttcgcccagccgcggccacgtgcgcctgaagtcgcgcgacccgcacgcccatccggcgatcctgtttaactatatgtcccatgagcaggactggcaggagttccgcgacgccatccgcattacccgggagatcatgaaccagccggcgctggataagtatcgcggccgtgaaatcagtccgggaatagaatgccagagcgatgccgaactggatgagtttgtgcgcaaccacgccgagaccgcgttccacccgtgcgggacctgtaagatgggttacgacgagatggcggtggtcgatggcgagggccgcgtccacggtctggaaggattgcgggtggtcgacgcctcgatcatgccgcagatcatgaccggcaacctcaacgccaccaccattatgatcggcgagaagatggccgacgccattcgcggccgccagccgctgccgcgcagcaccgcgacgtattatgtcgctggcgacgcgccggttcgccgctaacaggtcaatgccgggcggcgactacgccttgcccggcctaccctgaggcgatgtaacgtagccccggtaagcgcagcgcgatcggggtgccgttccgggttttgaccccataggttgatgttagcgaaacgcctccaggcgcttaatctgctgaccgtcggcagtaaagttctccgccgccagccacgcccgcagcgccgcatcgcgcgcaggccactcgccgtcgatgatggacagcatatcgctgtcgcgcgtccgccctttacgcaccagcctctgccgcagacgtccttcccagctaaagcccagccgctcggcggcgcggcgcgaggcgacattcatcgaatcgcatttccactccagccgacgatagccatggtcaaagccgtttttgagcagcagccagaccgcttcggtacccagcggggtgtttttcatccgtcgcgaccaggtgacatggccgatctcaaccgtgcccatttcccgctcgatcgccatatagctgacgatgcctaccgcctgctcgctacgcaggtcaaccaccgcatacggcaccagggcatcatcattcaccttgcccgcgatccagtgggcggtcgccgccacgctctccggccgcgtagacgccagccacgtccagtcgcggttgtcgccgagcgcataggcggcaaacagatccgccgcatgacggtcaacgtccagcggctccaggcggcaaaaacggccatttaacgccgtccgccgcaggacttgcgccccctgccagccaggaaccaggtcgttcacctgctggccatactcattgatttccggcacatccacctcctcgcaatagacaatgcgttatagcaagaaccccgcagcggagaaaggcgcttctgcgcgaccggcaataacctgtcgttcttgaatatgcgtttttagcataaggatatccttattttgactttacgccttatggcaagcggcctaacgtagcgaggcataaaacaataaaataaccattcttcagggattgcacatgaccaaaaaactgttgcctttactgctactatcggcgctctccgccgccgcgcatgccgccacgccgcccaacacgctggtggtcgcccagggtctcgacgatatcgtcagcctcgacccggcggaagcgaacgaactctccagcattcagacggttcccagcctctatcagcgtctggtgcagccggaccgcaacaaccctgaaaaaatcgtaccgatcctcgccgaaagctggcaggccgatccggcggcgaaaaccctgaccattaaactgaagccggatgccaaattcgcctccggtaatccgctgcgcccggaagatgtgattttctcttacacccgtgcggtgacgctgaataaatcgccagcgtttattctcaacgtgctcggctggcagccggacaacatcgccagccagctgaaaaagattgatgaccataccctgacgctgcactggaccgccgacgtcagcccggcggtggcgctgaatattctctccacccccatcgcctctatcgtggatgaaaaacaggtggcgccgaacgcgaaaaataatgacttcggcaacgactggctgaagatgcactcggcgggcagcggggcctataaaatgcgcgtctaccagccgcatcaggccatcgtgctggaagccaacgccagctcccccaccggcgcgccgaagatcaagagcatcattattaaaaacgtccccgacccggcttcccgccgcctgctgatccagcagggggatgccgacgtggcgcgcgatctcggcgctgaccagattgccgccctgcaggataaacccggcgtgaaggtgctgagcatcccgtccgccgagcagaactacctggtgtttaataccgccaacagcgccaacccgctgctcaataatccggcattctgggaggcggcgcgctggctggttgattatgagggcatcaccaaaaatctgctgaaaggccagtactttattcaccaaagcttcctgccggccggcctgccgggggcgctggagaccaatccgttcacctttgacccgcaaaaagctaaggctatcctcgataaagcgggcattaaggatgcccacttcaccctcgatgtggagaacaaaccgccgtttatcaccatcgcccaatcgctgcaggccagctttgcccagggcggggtgaaggtggatctgctacccgccgccggcagccaggtctatgcccgggtgcgcgcgaagcagcatcaggcggcgatccgcctgtggatcccggactactttgatgcccactccaatgccagcgcctttgcctggaacgatggtaaatccagcaccgtggccgggctcaacggctggcagatccctgagctgaataaagccaccctcgccgcggtggcggagccggacccggcgaaacgcctcggcctgtacaaaacgatgcaggaaaccctgctccagcattcgccgtacgtctttattgaccaggggaaaacccagatcgtggtgcgtgacaacgtgaagggctatcagcagggactgaacgccgacatggtctggtacgataacgtgaccaagtaagcgggttttgtcaccgggtatggcggccttgtctgcccggatgaccgactcctcacccgggcccggtcggcatcgcgccgccgggtacaatgctgatataccaggaatttccattttccatgccatcgtttcccactcaccttacccgcctgctgcaggggctgtttacgctgctgctcacgctgttcgggctgttgctggtcaccttctcgctctccgcgctgtcgcccgtcgaccgcgtactgcagatcgtcggcgaccatgccagccagtcgacctatgaccaggttcgccatcagctgggtctcgaccagccactgccggtgcagttctggcactacctggtcaacctggcccatggcgatcttggcatcgccagcgccaccggccagccggtgctccacgacctgctggcggtcttcccggcgacccttgagctggcgaccctggcgctgatcgtcggcgcggtactgggcatcgtcgccggggtgctgtgcgcccgttacgccggttcgccgtgggatctggcggttcgcacctttaccctgttgggcaactcggtgcccattttctggctcggcctgctgatgctggccctgttctacgcccggctgcagtgggcgccaggcccgggtcgcctcgacgatatttatcagtacaccgtcgagccacgcagcggttttgcgctgatcgacacctggctctccggcgataccgcggcgtttaaaaatgcgatcggccatctggcgctgccggtgctggtgctggcctattactcgctggccagcatcacccgcctgacccgctccgcctgcctgagcgagatgaacaaagagtacattctgctggcgcgggccaaaggggccggagagatgacgattctgttgcgccatgtcctgcccaatattcgcggcaccctgctgacggtgatcgccctcgcctggacctccatgctcgaaggggcggtgctcaccgaaaccgtcttctcgtggccggggatcggccgctacctcaccacggcgctgttcgctggggataccacggcgatcatgggcggcacgctgctgatcggcgtgagttttgtgctgatcaataacctgaccgatctgctggtacggttaaccgatccgagggtgcgctgatgccgacttatctgtttttacgccgtctgcgccgctcacccgccgccttcagcggcctgaccctggtgatcctgctggtactgaccgcgctgtttgccccgtggctggcgccgcacgatcccaactggcaggatgccgccgctcgtctgcaggggcccggggcgggacactggctcggcacagacagctacggccgcgacctgctgtcgcgcttgctctacggcgcccgcccggcgctgggtctggtggcgctggtgaccgccattaccctgcccgtcgggctgctggtaggtatcctctccggctactatggcgggtggctggagcggatactaatgcgctttaccgacgtggtgatgtcgatgccgcgcctgatcctcgccttcgcgttcgtggcgatgctcggcccggggctggtcaacggcgcgctggcgttagccctgaccacctggccggcctacgcccgtcaggcgcgcagcgaaattcagcgcctgcgccatagcgactacctcgccgcggcggagatgctgggcattcgcggcgggcggctgctggtcggccatattctgccgctgtgtctgccgtcggcgattgtccggctggcgctcgatctggcgggcattatccttgccgccgccgggctcggctttctcggtctgggcgcccgcccgccgatggcggagtggggagcgatgattgccgacgggatgcaggtgattttcgaccaatggtggatcgctgccatccccggcgcggcgatcctgctcgccagcctggcgtttaacctgctgggcgatggcctgcgcgatattctggagccgcaacatgactgacatccgattgaccgtccagggactcgtcgtcgactatcccaccgcccgggtggtggacaacgtcagcttcaccctcggcaacgagcggctggcgctggtgggcgaatccggctccggcaaatcgatgaccgcccgggcgctgatgggcctggtacgcaagcccggggtggtgagcgctgaacggctggaggtgctggggcgcgatgtgctgaccctcagcgcccgcggctggcgcgcgctgcgcggcaacgatatcgccatggtgctgcaggacccgcgctatgcgctgaatccggtgcagaccattcagacgcagctggaggaggcgttaaccctgcatcagcgtctcagccgccgcgcgcgcgccgaggcggtcaaagacgccatcgccgccgtcggtctggatctgccggtcctcagccgctatctcggcgaactctccggcgggatgggacagcgggtgatgatcgccctcgcgctgctcaataacccgaaggtgctgatagccgacgagccgacctcggccctcgacgcccgcctgcgcaaccagatcctcgagctgctggtggagcagagcgcgcagcggcagatggccatgttactgatcagccacgatctaccgctggtagccgcgcattgcgatcgcgtgctggtgatgtaccaggggagacaggtcgacgagatgccggcgcgggcgctgccgagcgcgacgcacccttacacccgcaccctgtggacctgccggccaaatgcccacacctacggccagatgctgccgaccctcgacagaacccaggactttacggagacaacccatggcgatcgttaatcttcaggatttacaggttacattcggcgcgaagacggcggtctccgccgccagtttccgtgtcgacgccggagaaaccttcagcctgatcggcgcctcgggctgcggcaaatcgacgattttgcgcgtgctggccggattgcagcgcgaatggcgcggcagcgtggatctgctcggccaggccattatgccgggcgcccgctttcagggcgatctgcggcgcaacgtgcagatggtgtttcaggatccgtacgcctcgctgcatcccaaccataccctgtggcgcaccctggcggagccgctgcagatccacggcatccgcgacgttgccccgcgagtaaccaccgcccttgagcaggtgggtctggccgccgacgccgtgcgccgctatccgcatcagctctccggcggccaacggcagcgcgtggccattgcccgcgccctgctgctgcgcccgcagatcctgctgctggatgagccgacctcggcgctggatatgtcggtgcaggcggaaatccttaatctacttaatcgtctgaaacaggagcacggcatgacctatctgctggtcagccatgatgccgacgtcatcgcccatatgtccgatcgggcggcgtttatggcggagggcgtgatccagcgctttttcgatcgcgaagcgttggtcaacggagagcaccggatgaggtgaggtcagcgtatgtgcggttgttttgtcgggtggcgcttcgcttacccgacctacaggatccactcacaggctcacaccccgtaggcccgtgcaagcgcagcgccgccgggcaagatatcaggcacggtatccttgatttcgccgggtggcggctgcgccttacccggcctacaggatccactcacaggctcacaccccgtaggcccggcaagcgcgccgccgggcaacagtatccggccccctcccctacttcgccaggctggcaaagcgagcaaagaccgcatcaaaaatcgccagcccttgcgccacctgctcagcagtaatggtgcacggcgggaccacgtgaatgcggttctccaccacaaaggccagcagcccggcttcggttaaggcccctttgatcgcagccatgtcggcggcggtcagcggcgttttttgttcacggctgctcaccagctccagcgcctggaacaggccgcgaccgcgcacctcgccgataatggcgtgcttctccgccagcgcctcgagaccggggcgcagcacctcgttgccgatagaggccgcgttctcaaccaccttctcctctttcatcgcgtcgatggtggcgacaatcgccgccatcgccagcggatggccggagtaggtcagccccccggcaaagaagtggtcgtcaaagtagcgggcaatcggctcgctaatcagcaccccgcccgccggcacgtagccggcgttaacccccttggcaaaggtcaccagatccggcaccacgccatcctgctcgaaggcgaaccagctgccggtgcggccaaagccggccatcacctcatcgaggatcagcacgatgccaaactcgtcggccagggcgcgcacgccctgcatatagcctgccggcggcacgaggatcccggcggtgccggggatggactccagcaggatcgccgcgatggccgtcggcccctcgcattcaatgatccgccgcagatgcgccagcgcgcgctggcactcctcttcctcagtcgcggcgttgaactcgctgcggtaaaggtaggggttgaagaagtgaacgtggccgcgggagaactcattcggcacccggcgccagtcgccggtagcggcgatcgcgctgccggtgttgccatgataggaacgataggccgacagcaccttgtcgcgcccggtatagagccgcgccatgcgaatcgcgttctcattggcatccgccccggcgttagtgaagaacaccttactgaagcccgccggcgccaggtcgacgatgcgcctcgccgcttcgccgcgggcaaggttggcggtggcgggcgcgatggtgaccagggtctccagctgcgccttcatggccgccagtacccgggggtgctgatagccaatgttgacgttcaccagctggctgctgaaatcgagccaggtgttcccctcataatcccatagctcgcagccttgcgccccggcgatgaccagcgggttgagattgccctgcatcgaccatgaatgaaacacataggcgcgatctaattgccgaacttcgtcattgcttaccgcgacctcgttgtgaattgccagcttcataccctgccctctctcatgtcgtagtggttggcttcatcattggccttggccgcgcaaatcggatagagccagtgcgcgcataacgatgtgacacggtgtcacatccccgcccgtcgtctggccctgtgccttgtcgtccggcgtttttatagtgaagggacaaccgcacaggagaatgagatggcaacgagcaacgtagtgtttatcaccggggcgacctcgggttttggcgaagcggcagcgcaggtgtttgccgacgcgggctggtcgctggtgctgagcgggcgccgctatccgcgactgaaggccttgcaggacagactcgccgccagggtgccggtgcatattattgagcttgacgttcgtgacagcgaggcggtggctgccgccgtggcgtcgctgcccgccgatttcgccgatatcaccaccctgatcaacaacgccgggctggcgctgtcgccgctgccggcgcaggaggtggcgctggaggactggaaaacgatgatcgacaccaatgtcaccggtctggtgacagtcactcacgccctgctgccgacgctgatccgccatggcgccggggcgagtattatcaatatcggctcgatcgccgggcagtggccctatcccggcagccatgtgtatggcgccagcaaggcgtttgtgaagcagttcagctataacctgcgctgcgatctgcttggcaccggcgtgcgggtcaccgatctggcgccggggattgccgagaccgaattcaccctggtgcgtaccaaaggcgaccaggcggcatcggataagctctatcgcggcaccacgccgctgagcgcgcacgatatcgccgagcagatgttttatatcgccacgttgccggcgcatatgaacattaaccgggtggaggtgatgccggtgcgtcaggcatggcagccgttcgccatcgatcgggattaagcgaaacccgacgcatcccctgccggcgctgccggcaggggatgcaggccggactaacggctgctttgcagaaactgcctgacgcgttcggagtcaggctgagtgaagaacttctccggcggcgccttctctatcagcagccccttctccagaaacaccacctcattggacacctggcgggcaaaatccatctcgtgggtcaccaccaccatggtgtagccctcggcggcaagggctttcattacccccaacacctcattaaccagttccggatccagcgccgacgtcggttcatcgaagagaataacttccggcgacatcgccagcgaacgggcgatcgccacccgctgcttctgtccgccggagagagtgatcgggtagacatcggctttgtgcgccatgccgactttctccagctgctgcatggccatggccttcgcctcgtctcgtttcatgcccttaacgcgcagcagcgcctcgctgacgttctgctgcacggtcaggtgcggccacaggttaaaactctggaagaccatccccacccgctcgcggattttggccagctggcggtgcgacatcgcccggccgcgctgttcatcaatccccagccgctgaccgccgatatgaatttcaccgcggtccggctgttccagccagttcatacagcgcagcagggtggattttcccgacccggacgagccgagaatactcaccacggtccccttctccaccgtcaggttaatatcccgcaggacttccacattatcgaactgtttggagacgtttttgacgcttacggcaatagactcaggcatggctcattcctcttttggctccccaggcggtcaggcgcttaatcagcagctccagcagaatgctgatcgcccagtaaagcccaatggcgacgataaaggcgttaaacggaataaaataggtcgcctggacgctgttggcagcggcggtgatctcctgaacggtaataatgctcaggaaagcggtgtccttcaggcaaataatcagctgattgccgatcagcggtaaggcggaagagacgatattgggtaaaataatccgccgaaaaatggcatagcgagaaaagccctgagcaattgccgcttcaatatatccgccggaaaatacccgccgctggctgcgcaatatttcaaagaaataggcgccatgataaataatcaaggccagtaaaccggcggtccacggctccatgctaataccgagctgcggcagtccgtaatacagaagataagcgaggatcaaaaaagggatcgcgcgcatcaggctgacgaaaccaataataatccggttaatcactttcttttgatattcgctaaaataacacagcgcaataccgataatcagcgccgccagggcggcggtaataaacagttcgagggtcgcgaataacccggcaataaagctatcgcgaaccgaccagataacgccccactgattcataatgcctcccgttcctagcgcgccagacgcctggctttacgttccgcgataccctgcagcttcaacaaacagccgatgatcgccacatacagcaggccggcggcgaggatcggcgacagcggctcgtaggtgaccgaggatatacggttggtgacccgggtgagatccaccacgccaatcacggcgatcgccgggctacctttgatcaaaaaggacatctcattgaccagcgccggcaggctctcgatccacatctgcggcagcatgatgtagcggaagtaggtccagcggcgcatccccaccgactccgccgcctcccgctgttcgcgcggaaaggtgcggaaggcattgcgccagatctcagcgttaaacgccgacgtgttaagcgtcagcgccacgatggcggccacgttcttgtcgaggttaatgcccatcgtgggcagggaaaggaacagaaatagcaccagcgtcaccagcggcgtcgcgcgggccagactgatatagaccaccagcagctggtcgatcaccggcaggcgcagcatccgtaccagggcgatcagcaggccagccaccaccccgaaggcgatagcgatggccgaaatccagagggtcgtccatgcgccttcgattaataactgccaggaaattgcatccatgaggccctccttctcaacaacaggcggcggtcgcccgccgcggaatattacagtccggcgagtttgtgaaactgttccgggctggtgatcgcctcggtcggcaggttgtcataggtttcgccgaaccattttttctgcagctcggcgagcttgccggtctccttcatgtggttcataaacctggtcatataggccagcagctgcggcgagtttttcgggatcggccacgccatataccccggtccggagacggccagccctttggcgaagacctccggtttggctttcgccaggtcgtttaccgagatcaccacgttaatcacgtaatccagtcgcttgttcgccaggtcggcgtaggcttccggataggagggatactccaccaccggtcccagcttgccgccggtcttctccagcatcgccttcagctccggcaaacgcgccagcagcgcgctcccggcctgtacccccacttttttgccgctgagatcggcaatggtatttagcgaggtatcgccagcgcgtttgacgaaatagtgctgcgcggaggcccacggtggggtgaaatcaaagaccttcagccgctcatcggtaataaccgccccggttaaggccatatcgtattgcccggtggagacagccgctaataatccggtccacggtaatatgctctggtcgacatggaatttggcgtacttacgtaactcctcaagcatatctttgttaaagccatcggcctggccattattcataaagttaaatggcgcataatcatcttccgtcgccactttaagggtgccggatttttctatttccggaagatcggccgcgacggcgtgataagaaaaagcgaccgttaatacagcgctcagacacattgatgccaatgattttttcattatttcacccctgatggattggccagacgggttcattccagaacgcgaaaaggtttctgcaaaatagtggccggggacgttccggtccacggcggctgaatacgtttttaatgtgggagcgtttttcaattccgtatagagccagatgggccgcatcgctgtgtcagatggcggcagggtggtatggaatttgctgagtgtaacgggtggtcgcaatgcgttattgccagaggagccccgtatgatccgtcacctgttacacgttgattttcagcctggccgcggtttgcaggaacaggtgcgagagacgctggtgaatgccattctcagcgggatcttcgccgccgacaccccgctgccctcctgtcgccagctggccagccagcttcgcgtctcgcgtaacaccaccgcgctggtgtttgaaagtctggtcaacgagggctacctgattagccgcccacgcagcggttactacctgcatcccgactatcatgaagcttcgcctgccgccgtcgagagtgcaccgcagcgcgaagcggctgcaccacgctggggcgaccggctgcagatgacccccagccagcaggagtcgatcctcaaaccggcgggctggatgcactaccgctacccgtttatctacggccagcccgatacccggcaattcccgctggccacctggcgctcggcggcgaactggctgcacggcggggtgcgcgacccggcgtgggtcatcgaccatattgaccaggatgtgccgatgctgatcgagcagatccgcacccgggtgctgcccaagcgcggcattgtcgccgcgccggatgaaattctcatcacccttggttcgcaaaatgcgctctacctgctgacccgactgctgctctcttccaccacccgcattggcgtcgaaaacccctgcttccgcgaagccatcaacacctttctgctcgccgacgccgaggtggtgccgcacccggtggatgaagaggggatcgtgcttaatgagcgtccctgcgattactactatgtcactccaggccatcaggtgcccaccggggtgaccatgagcagtgcgcggcgtcgccagctgctggagcatgccgcccgccatgacgcggtcattattgaagatgattatgactcggagagtaactttaccctcaacccgctgccggcgctgaaggccagcgatcgcagcggccgggtggtgtatgtcagcagcctgtcaaaagcgctgtcaccggggctgcggttggggtttatggtcgccgacccggacctgattgacgaggcgcgcgccctgcgccggctggtctatcgccatccgccgaccaacattcagtaccagatggcccacttccttgcccagggccattatgaaacccatctgcggcgctaccactatgactccgcccagcgctgggaacgcctgcatgccgccctgcagcgctatctgccgtcgtgtcgcgcgctggcggggagcgagcatgctaacgccttctggctgcagaccccggcgcagatcaacacccagcaactcacctggcgcgccgcccacgccggcgtgctgattgagcccggggcgcgccattttctcagcaccgcgccgccggataactattttcgcatgggattccacgccattaaccccgacgccatcgcccagggggtggaggtcctgcgcggccagctggagcagatgggttagcggtattgttcatactcaacggcgtcgcgcacgctgagcagcgccgggcgcagactgtcgaaaggcaccgatccgagcgcgatgcgcagcgcctgcgggatcgtggtggagacgcagaacggctcggcggtcgacaccgaaatacggcgttccatcagcgcattcgccagtcgatcggcccggctctcttcacccagcggcagccagacgaagtacgaatcgggatgactgacgacgggaagcccacaaagcacctcgcgggccacctgctgtcgctgtcgcgcatcctggcgtttctgcgtttcaaagcgcgccaccgtgccatcttcaatccaggcgcagatcagcgaacttatcagcgtcggcgtattccacgtcgtggcccggatggcgcgctcaatctccgggcgatagcgcggcggagaaatcaccacccccacgcgcagtccggtggcgatattttttgaaaatccggtgacatacaccgttctttccggcgcatagctgaccaccggcggcggcggacggctcaccagccgggcataggcggcatcttcaataatcagcagatcgtgctggcgcgcaagatcggccagcgcctgccgctgaccggtgttgagcacccagcccagcggattgtgcagcgtcggcatggtatacaccgcccgcacccgccgctgctggcacagcgtctgaagcgcctgaagatccggtccctccggccgacaggggatcgccgccagctccagatgatacagcgccgccagaaccttgaagcccgaataggtcagcgcatccaccgccaccacatcccccggacgtaacagccccatgacggtcaccgccagcccgtgctgtgcgccgttgacgatcaggacattttccgcgtccggcgcaaagtgctggcaggtcaaatggcgggcgataatgtcccgctcggcaagccgccctgcatgaggctgatagcgcagatgcgagtcaatatcgcccgccatcgccagctgcctgagcgcctcgcgcagcgcatcgccctgatccggcagcgaagggtagttgaaattgagatccacgacatcggcggcgaccacctgctgatcgaccccatgccccggcggcagcgagaggtcgcgcacgaaggtgccgcggccggtttcgccgctaaccagccccatctcttccagttcacgatagacgcgcgtggcggtggccagcgagatgcgctccccggcggcaagggtacggtgcgtcggcagtcggctgccggcgggcagctgcccgctgcggatcgcctgcgcatatcggtcgacaacggctttatatcgggctttcatcgtgaaatgtatctatgacaataatttgattgtattagattggccacattaccatcgccgctgacgatgctcaagcgggcgcagcccaatcagataacgcgaggttaacgtggtagattcaacactggataaatcggcgcccggcccctggtccggatggcttcatggtttactgggggtgatcattttcagcgggtcgctgcccgcgacgcggctggcggtgcaggatatggatccgttgttattgacctttctgcgcgcctccatcgccgggctgcttgccgtcgcgctgctggttggctttcgtcagaaacgcccgcgcctggcgcagcttgtgtccctgatcatcgtctcatctggggtggtgctcggctttccgctactcacggcgctggccctgcagcgcatcacctcggcgcattcgattgtgtttattggtctgctgccgctgatgaccgccctctttggcgtactgcgcggcggcgaacgcccgcggcgggctttctggatcttttcgctgctgagcagcctgctggtggtgggattcgccctgacgcaaagtgcggcggcctcactcagcggcgatctgctgatgctggcggcggttatcgcctgcggcctcggctatgcggaaggggcgaagctgacgcgggagctcggcggctggcaggtgatctgctgggcgctggtgatagccctgccgttgatgctccccgcctcgctgctggttcagcccgcgtcctggcatgccatctcggcctcctcctgggcggcgctcggctatgtgtcgctgttcagcatgctgatcggtttcatcttctggtacaaagggcttgccgcgggcgggatcgccgccgtcggccagctccagctattgcagccgttcttcggactaggcctgtcggcggcgctgttgcacgaaaccgtcagccccttgatgctggcggtcacgctgggcgtggtgctgtgcgtggtgggctcgcgcaaatttggccgccagcgggttggcgaagagaacgggggcaacaattgacctgacgcgtcacctaatatcgcgggatgcggcgcgaggcgaatggataagctgcgtagcaaagccaacgtaaatgtgtgacgggtatatacttcagggaatacatcgaccgggagagactatgcctttagccgattttcaccgctccgatccttttaccctcggtatcgaactggagctgcaggtggtgaacccgccgggttacgacctcagccaggatgcctcgacgctgattgccgacgtccagcatgagctgaccgtgggagaagccaaacatgacatcaccgagagcatgttggagatcgccaccggggtgtgccgcgacatcagccatgcgcaaatccagctcagcgccatccagcaggcggtccagcgcgcggcgctgcgccatcatctgcagatctgcggcggcggttcccacccctttcatgcctggcagcgccagcaaatcagcgataacccgcgctatgtcaaaaccgtcgagcattttggctatctggcgcagcaggcgacggtctttggccagcatgtgcacgtcggctgccagagcggcgacgacgccatctatctgctgcatggcctgtcgcgctttgtaccgcacttcatcgcccttaacgccgcctcaccgtggtttgacagcaccgacagccgcttcgcctgttcgcgcctgaaccgcttctcctcctatcccgacaacggtccgatgccgtgggtggccgactggcaggggtttcgtcgcctgttccgccagctgagctacaccagcatgatcgatagcatgaaggatctgcactgggatattcgccccagcccgcagtttggtaccgtcgaggtgcgggtgatggacacccccttgacccttgcccaggcgatccacatcgccggctttattcagaccctggcctgctggctgttgacggagcgtccttttaagcaccagcctgatgattatctgctgtacccctttaaccgctatcaggcctgccgctacgggctggacgggaccctcaccgacgtgcgcagcggggagcagcgcagcatccgccaggagatcctgcagctcgccgaccggctggcccctttcgcccatcagctgaaggcgacggcagcgctggaggcggtggttcgccaggcgaaatcgccgcaaagcgaggcgcagcagatgcgcgactttatcgccaacggcggttcgctttccgggctggtgcaaaaacactgtgagatttgggcggcataaggcagcgaggcgggtatactcggcgcagactatagaaaggactgcccatgttattacgttgcctgctccctctggcgctgctgcccctggccgccgtcgccagcgccgcctgtaccctcaccgacccgacgctgaccctgcagagctatcgggtggatgcgcagaaagagcgcattgcgatgtactggcaggatcggcacggcaaagcctggggttccctgcgttcgctgctggcgggtatcgatggcgacggccgggtgcagatggcgatgaacggcggcatttacgataaggcctacgcgccgctggggctgtatatcgaagacggcaaacggctgacgccggtaaaccgctccgccggcggcgggaacttctttatccgccccggcggcgtattcctggtggaaaacggccgggcgaaaatcgtgccgctgccggcgtacaaaccctctcccgccatccgctatgcggtgcagtccggcccgatgctgattgaaaatggcgccatcaactggcgactgaagccctccgccagttcgcgcaagctgcgcaacggggttggtatcgataagcagggccgggtggtgtttatgctcagcgatcgcgagaccaacttttacgattttgcctgctatgcgcagtcaaagcttggcgtgcggcagatgctttatctcgacggcaccctgtcgaagatgtaccgcaaaggcggcagcgtgccgtggcagtatcatccgttcgtgaccatgataacggtggagagaaaatagcgggcgcgtttgggggcggccattccagccaggagagtgaataaattaacgacaggccgggcaaggtattgccgccgtgcccgatgtccttgcccggtggcgctgcgcttaccgggcctacagagtctgttcgctatggtatggcccctgaaatctacgggcgtgcagcagggctgattcccgctgaaatcagcgaaccggaggtcggcagataaggcggggttcacgcccaaacgcaacgtgaacgcaaaacccaccctcaccctccccctctcccaaagggagaggggaccgcccggtagtcgttgcagcctggagtatccccgttaccgaccggtagcgccgcgcttacccccgccgatgcgcccactcgcgcatacgttgaaacagtacatacagcgacgggataaacaggatgccaaccatcgtcgccaccagcatcccgctgaataccgtggtgccgatgatccgccggctctgcgccccggcgccggtggcgagcatcatcggcatgataccgataataaacgacaccgcggtcatcattaccgcgcggaagcggcgggtagccccctctcgcgcagcgtcgactatcgacagcccctcctcgcgccggctgcgggcgaactcaacgatcagaatcgcattcttcgccgccagggcgatcagcagcaccagccctatctgaacatacacatcgttggcatagcccgcggtccacagccagagcagcgctccgccgatggcgaacagcaccgagagcatgacgctcgccggcagcgtccagctctcatactgcgccaccaggaacagccacgccatcgccaccgccgccagcacgatccacaccgcctgattaccggtctgctgctcctgccaggagatcccgctccaggcatagtcatatcccggcggcagatgggcctgcaaaatctgctccatggccgccatcgccgtgcggctgctgaccccctcggccgctgaaccgctcaccgacacggacgggaattgattgtactgctgaataaacggcgcccccaccgtcggcgtaatggtgaccagattgctcagccgcacccgctcgccgtcgcggctgcggacgtacagctcgctaatctgttcagcccgctcacgccactgcatctcattttgcatcaccacatgatagacacgattgttacggctgaaatcgccggcgcgcgtgccgccgaacgccgtctgcaggctgctgaagatctgcgccaccggcacatccagcagcgccgcccggtcgcggtcgaccgtcagggtcagctgcggcacgttgctgctccaggtggtaaacacccggctcagctgcggatgctggttcgccagctggaggatctcccgcgtcacctgctccagctccgccgacgactgaccagcctgcgccatgatgcgcagatcaaaccccgaggcattgcccaggcccggcagggtcggcggcgcgaaggtcatgatcgtcgcctcgggtagcgacagcagctggcgctgaatatccgccatcaccgcatccagcggcggccgctgatgccagtccttgagcattaccgagataaacccgccgttagaggcgctggtgccgttgagaatgttgaacccggacacctgaatcacatcctccaccgccgggttagccatcagcagtttacgcgcctgggccatcaccgcttcggtacgctccagcgacgccgcctccggcagctgcacgctggcaaacaggtaaccctgatcttcctgcggcaggaagcctttcggcatcgaggtgaagctgaacgccaccagcgcgcctgccgccaccgtcgccgccagcgccagccagggacggcggttcatccagcctaccagccggccatagccgtcgcgggtgccgtcgagaagacggttaaacgcccgccacaccgccgccggccgggcaggacgcgggcgcagcagcagcgcgcagagggccggcgtcagggttagcgccaccaggctcgacagggccaccgcggtggagagcgtcacggcaaactgccggtacagctcgccgacgatccccgggagcagcgccaccggcacaaacaccgccagcagcaccagggtcgtggcgatcaccggcccggcgatctgccgcagcgcctgggcggtggcctgcaggcgatccagcccttccgccattttggtttccacattctccaccaccacaatggcgtcatccaccaccatcgtcagggcgagaatgatcgcgaacaggctgagggtgttggcgctgtagcccagcagatagagcaccgcaaaggtgccgatcagtgacaccgggatcgccagcactacgatcagcgtcgcccgccagctctgcaaaaatagcgacaccaccacgaccaccgccagcagggtcagcgccagcgagacgccgatctctttgatcgtcgccgccacaaagcgggtggtatcgaacttcacctcccaggtgagatccgccggaaagcgagtgtgcaggcggttaagctccgcacgcactgcgctggcgacctgcagggcgttggcggtgggcgtcggatagatccccagataggccgacgctttaccgttcagctgtgcgccggagctgtagctgcgggcgcccagctcaatggtcgccacgtcggcgaggcgcaccagctgcccctgcgcgccgcggcggataataatctcgccaaagctggccgcctcgttcagacgccccagcccgttgatggtcagcgtctgctgctggccgttaaataccggcggggtgcccacctgccccgccgcgccctgcacattttgctcgcgcagcgcctgggcgacatcatccgtggtgatgttgagcgcgttcatgcggtccgggcgcagccagatacgcatgctgtaatcccgggcgccaaacatctgcacctcgccgacgccgggcaggcgggccagcgcctcgcgcacctgggtgctggcgtagttgctgacaaacagcggcgtcagtgtgcccagcggcgagtagaggcttacccccataagcagattgctggcgcgcttgcgcacctggacgccattctgctgcacctccgccgggagctgcgccagcgcctgcgccacccggttttgcacgtcgatcgccgccaggtcggcatcggtgcccgccgcgaaggttatgctcaggcggtacgtcccctcatccgagctggtggactccatatacagcatatgatcgacgccgttgagctgggtctccagcggggcggcgatggcttccgccacgtctgacgcgctggcgcccggccagctggcgctgacgttcaccaccgggggggtgatcgccgggtactgctccaccgggatcagcttcagcgacaccgcgccgacaaaggtcagcagcagcgcgatcaccatggcaaatcgcggacgacggataaaaaaggtcagcatcccttctccttagctagttcagcacctgcaccgcggcgccttcgcgcaaccgctgcgcgccgtcggtgatcacctgctcgcccgcctgcagccctttctcgaccgcaaactgctgcccctgctgccccgcgagggtcagacgacgctgcccggcggtgtggtccggcttcagcacccagctgaaaaagccctgcggatcctgctgcacggcggcggccgggaccatcactcgcgacggcagttcctgcggacggaacaggatcgtcacgctgccgcccggcagcagacggtgctgcggattggcaaactcggcccgcaccgctacgctgccggtgcgggcgtcgatccggttatcgatagaggtcaacaccccgtcgcgccgtttaccatcaacctcaatctgcgccagccacgcctgcttcagagcgtggatatcggcgtgctggccggttttgctgaaaaacgcggcttcgtcgagggcgaacgagacccgcaccggatccaactgcacaatgtccaccagcacgccgctggacgaattgaccagcgtcccgacgtgaaaggcgctatgtcccacgcgaccggtcaccggcgccgcaatctgagtgtagctgagcacaatctgctgggcctcgacgcgggctttggcctgctgtacggcagcggcggcgacgtcgcgctgcatccgggccgtatcgacgtcgttgcggctgatggagtggttgttgataagccgctcgtagcgagtgagcaactgctgcgactgacgtaatgaggcttcggcgcttttcagctcggcctgcgccagagccagcgccgcgcggggctgcgcgtcgtcgagggtaaacagcaggtcgccttcggtaacatactggccgtcctggaagtggcgctgaacaatcaccccttcggtgcgcgcgcgaatgtcgacggcgcggatcgcctcgacccgcccggggatagcgcgttcttcagcatgaggagccagttcaaccgtggcgacgcggaccggcaccgccggcgcggcggtcgccgtcagggcgccgacgaccagaccgcaggccagcagagcaaagcggaaggttttaatcatagaggatccttgcgacagtaacgcgcgcctgcagcgaggcgcgcgagattgttcaggccgttttgcggaaccggcgcgtcagacgcttctcgatttccaccaccaggaacatggcgacgccgatgaccagagtgacaaaccagtagcgcagcggcagcgcttccgtaccaaacatgctctgcatcagcgggacatagataatgaccagctgcatcagcagcaggacgccggtcaccagccagatgcctttgttgcgcagcagacccatgctcagggagaagctgtcgctgctgcggcagttgatcatgtagacccactgcgccgtcaccagcatctgcagcagcacggtgcggataaactccggactgtggccgcgcggcgccagccaggcctcaaggataaaggcggcaatcgcgatcatcgacccgacgaaagccactcgccacacggcgaaaccatccatcacatgctggccggttttacgcggcggacggttcatcacgttgcgctctgcggcctcaaaggccaggccgaaggagagcgtcgccgacgtcgccatgttcatccacaggatcagcaccggggtcagcggaataatgttccccgccagcagggcgatgatgatcagcagcccctgcgccaggttggtcggcatgatgaagaggatggtcttcttcaggttgtcatagacccgacggccctctcttaccgagctggcgatggtcgcgaagttatcatcggtcaacaccatgtcggccgcctctttggtgacttcggtgcctttgatacccatggcgatacccacgttggcctggcgcagcgccggcgcgtcgttaacgccgtcgccggtcatgccgaccacttcgccgttatcctgcagggctttcaccaggcgcagcttatgctccgggctggtacgggcaaagatgtcgtactccaccgccgccttcgccagcgccgcatcgtccatgtgctccagctggtagccggtcatggcctggctgctgttggtgatccccagcatctggccgatgctcatcgccgtctgcgggtggtcgccggtgatcattttcacgcggatgccggcggtctggcaggcgtggatggcgtcaatggcttccggacgcgggggatccatcatcccggcgatgccgaggaaaatcagtccctcctgcaggtcctcatggttgagggtggtggcatcaaggctggccggcttacaggccgccgccaccatccgcagtccctgacgggcgaagcgcgccatctcctcttcccagtactgcgcctcgaacggcaccgcgccgtggcggctcatctgctcgcggcacatggcgaagataacgtccggcgcaccggtgatcagcacccgggcattgccatcgatgtgctgcagggtcgacatatatttgtactgcgagtcaaaggggatcttggccaccagacgggcctccaccgccgggagctgcgctttcgccgccagcactttaagcgccccttcggtcggcccgccggtgatcccccacagaccgcgctcatcctgggtaagctggctgtcgttacacaggtcgatggtgcgcagccaggtctccagcacggtgccgggctgaacctgcacgggctcatcgctcccctcgaggaagatccgcccctgcggctcgtagctgtcgccttccacccgatagcagcagtcggcggtgatgatcgctttgacggtcatttcgttcatcgtcagggtgccggttttatccgagcagaccacggtcatggcgccgagggtttccacggtcggcagcttacgaataatcgcccgcttgcgcgccatcgtctgcacgccgagcgacagaataatcgagatgatcgccggcagtccttccggtaccgcggctaccgccaggctaatcagcgacagcagcagctcgcccatcgggatatcccgcagcgcgaggctgaagataaacagcgccaccatcatggcgagaataatggcgaaaatcgctttgccgagcttatccatctgcaccagcagcggggtacggtgcttctcaatacccgccatcatctggttgatatggccgagttcggtctgcgcgccggtggcggtcaccacgccgacgccgccgccggcgctgacggtggtcccggaaaagaccatgttcacccggtcgcccagcggcagatcgccctccagcgcgtcggtgattttatccaccaccgtcgactcgccggtgaggatcgcctcttccacccgcaggttgtgggtttcaatcaggcgcatatccgccggcacgcggtcgccggcgcgcaggataacgatatcccccggaaccaggtcgcgcgtcgggatagtctcatgcttgccgttacgctggacgcgggcatcgctggagagcatgttgcggatcccctgcagcgatttttcggcgttgctctcctggatatgaccgatcagggcgttaatcaccgtcacgccgaggatcaccaaggtatcgacccagtgccccatgatggcggtcagcgccgcggcggccagcagcacgtaaatcagtacgtcgttaaagtgggcgagaaagcgcagccagcccggtttgcctttcttttccggcagcgcgttcggcccacaggtattcaggcgctcggcggcgtctgcggaacttaacccagcggcctggcttttggtctgcgccagcactgcgtcaacggtctgctgccagacctgccgtggcgcggtgtcgcccgagggcgtcgtaaactttgggttattcatcttggtcaatttacattttccttataaattccgtgagtcggaaagcctgaaatcattcctggccaatgaagtaaaagagggcaaaaatgccgataaaaatgtgaaccaatacaagtctaaatttttcgcaaaataaaaattttgtgataagttaattccacaaaccaactattacagaatattaataaaccaaaactaaacgaggtaaaatatgtttggaatctaccgcgggcgccgactggcgctgtacatcgcgctagccattatcattgctacgctggtgggatatagcacttacagttttgtaaaagcgctggcataataatgacgttaatttacacccggctgcaattaacttaattacaaattatttcagatcaattaacatgagagcgaaaggcaggcgataatatttaaaatagtcgtgttatagcgagtaaaaaaacaaagcatattgcgttaagcattattttaccggacaatatgttttttaactgatgattaacatgacatgaaacatccgctggaaacgcttctctccgccgccgggatcttactgctggccctgctctcctgtctgctgttgcccgcgccttcgctgggcctgacgctggcgcaaaagctggttgagacattccatatgatggatctcaaccagctctatacggtgctgttttgtctgtggttcttagcgctgggcgccattgagtatctggtgctgcgctgggtgtggcgtcgctggttttccctcgagcggtaaaccaggagaggcgcgcctcagtgggcgcgactgtggttctctttgcggtaggcgcccggcggctgattgaaggtccgggtgaagacgcgggtaaaggtctgttgcgaatcgaagccatacttcaggcagatatcgtagacccgctgatcggtgtcgcgcagatcgcgggcggccagcagcagcttcctttcgcgaatatagcgccccaggctctcccctttgtactgtaaaaacagccgttgcagatgccatttcgaatacccggcatggcgagcgatatcatcaatacgcagcggttgatgcaggttatcatcaatccactcgacgatagtatcaatcacctgagcggaaatcgtcatatgctctctcctctgatactgcactggcgcttagcgccaccaggcgttaaatgattgcgtcttatcggcgacccacaccggctcgccctgcacaggcgtcagcagacgccaggcccttccttcgctggcagccgccagccgttgatacggttcatcccagctgtgtttcgccaaaacgaatcgtcctgcatgcccaggcagcaccgcgcgagcgcgcaggtcgtcggcagcctgagccgtttcatccggcatcatgtggatatatttccagtcctggtcatactgcccgttctccatgatcgccagatcgaccggaccgaactcatcgcctatcgctttaaagtgcggcccatacccgctgtcgccgctgtaataaatcttttgctgccgggtaacgaacagaaaactggcccacagcgtctggttacgcttcagcccacggccggaaaagtgccgcgccggcagcacgtggacggtgagctcgtcgctggccggtaccgcctgctgccagtccgcttcggtaatcagcgccccgtccattccccagtagcgcagatgcgatccgacccccagcggcgtaatgacccgcttaattttcggcagtaaggcgcgaatggtggcgtaatccagatggtcgtagtgatcgtgggagatgatcagcagatcgatctccggcatcccttccgcccgccacggatagtcgccggggaaggctttattgataaaagagaacggcgccgcgtaatcgctgaacaccgggtcgatcaggatgcgttttcccgccagctgcaggtaccaggaggagtggccgagccagaccatcacgtcctgcccgaggggcagcgtcgccagatcggtcttcaccagcggcagcggttgcgcgggacgggcgttttcccgtttggtcatcaggaaatcccaccacgccgccagcatatttttctgcccggtgaaccctggcgtgggcaactggttatggaactggccgtcccggtagtggggagacgcttccacctggctaagctgtgccccctgcggcgccttaccaaaaccggcattaagaacaaacggcaatgtcgttgctgctgcgagtaacatgatggcgaccacgctgaaagtgacacggttcatatcctgaccagacaaaagcccccatcccggaggctttatgatataacttgattatgagtgagtacgcactcattattaggaaagcgatgaaagtcgtcaagacgattttcaatttttgcgttccgccgttgcagcgacctggtcagacgtgccaagatcggcggtttgtttaaacctgcgtgaggaaaaaagtagtggctcgtccaaagagtgaagataaaaagcaagcgttactggaagctgccaccgcggctttcgcccagtccggcatagccgcctcgacgtcggccatcgcccgcagcgccggtgtggccgagggaacgctgtttcgctatttcgccaccaaggatgagttgctcaacgagctgtacctcgcgattaagctgcgcctggtgcgcacaatgatcgccgggctggatccggacgagaagcgcccgaaagagaacgcgcgcaatatctggaacagctatatcgactggggcgtgcgcaacccgatggagcacaaagcgatccgccggatggcgctcagcgagcgcatcaccgacgaaacccgccgccaggtaaaagagagctttccggagctcaacgaaatgtgccagctgtcggtgaaagagatattcctcagcgaggcgtaccgcgcctttggcgacgccctgtttctgtcgctggcggaaaccaccatcgaattcgccagccacgatccgcagcgcgcccgggagattatcgccctcggctttgaagccatgtggcacgccctgcatgaggcggacgcataatgacgccggaaacactgcatccctgcgctcaccgtatcgccctgacctacccgtttaccgaacactgctggccctttgggccagagtacgacgtgtttaaggtcgacggccgcatctttatgatcaccatgactattcgcgggcgggcgctggtcaatctcaaggccgagccgcagaagtcgctgctgaatcagcaaatttatcgcagtatcgaacccggctaccatatgaacaagaaacactggatcacggtggtgccaggagaggatatcagcgaggatctgctggccgagctgattgacgattcgtggcatcaggtggtgaacaagctgagtaaaaaggcgcagcagcgcctgcgtccgcgctgattttcagccaaatgcgataagtgttatcgcatttttcacccttatcattttgcgatcttcgctgtactcttcctctcctgaacgcaccggtaaggtgctgtaaactgtgaggaagagttatggatatcgtatcggtcgctttgaagcgctattccaccaaggcctttgacgccacgaaaaagctgactgccggggaagcggaacagctgaaaacgctgctgcagtacagcccgtctagcaccaactcccagccgtggcactttattgtcgccagcaccgatgaagggaaagctcgcgtggcgaaagccgccagcggcacctacgtgttcaacgaacgtaaaattcttgacgcctcgcacgtggtggtgttctgcgcgaaaaccgcgatggacgacgcctggctgcagcgcgtggtggatcaggaagaggccgatggccgtttcgccaccccggacgcaaaagccgctaaccacaagggtcgcactttctttgccgatatgcaccgcaaagagctgaaagatgacgatcagtggatggcaaagcaggtgtatctcaacgtcggcaatttcctgctgggcgtagcggcgatgggtctcgacgccgtgccgattgaaggggtcgattttgcgatcctcgatgaggaatttgacctgaaagcccagggctacaccagcctggtggtggtcccggtcggccaccatagcgtagaagatttcaacgctaccctgccgaagtcgcgtctgccgcagtcgacgaccattaccgagatttaatctctccaccaggcgcctttcaccgggcgcctctggtgccgcttgttattgccgggtggcggctacgccttacccgacctacggcccgtgcgacctgtcgttaatttgcgccggtaagtgaatagccaccgagcgcgttagtaaagtaaaacttgcgggtgctttataccgcaggctaacgcgtatcgcgttaacgtatccagactggcgcgggtgatattggcttccattctggagaccgtcggcgcactcacccccatcctctgcgccacctgggctcgggttagccccgcctgctcgcgccattgcgccagcatagtacgtaatcgctgttgacgttcttgcgcatcgaatgcagcctgaacctcaggctggccaagcagttctgtttttaacgtatcccagtcaatgatctttttactcattgcgcatctcctctaatcgcttcagcgccaggcgaatttccgatgacggggttttttgcgttttcttgacaaaaacccgtagcagaaagagcgtcttgccttgctgaaaaacgtagatccctcgcccctgtaccgaacctaacgcacgaatttcaaatagcccctgccccagcggtttactgtcaggttctctcagcgcggtgggattttggcgtaacttgtctaattgccggatcatcttcgcctggacaatggacggaagcgcctgcaattcctttttaacgtccacatgcacaaccaatctgaacatcagactcccttcctctggatgttagcatataagacaaattgccttaaaggctaatctttgagatacccggcaagcctatgctcatttgcagccaatcgcagaaaaatgcgctaaaactggaatcagggacgaaaaaaggccgcgactgagcgcggcctgagtggttagcgttctcaacgcgagcttattttttctccacctgcccttcgccggcatgccagatgcgctcggcatagcggccaatcaccgccagcgagacggcaaggatcaggaaaaacagcactttgtgcatcccgttccagaaaaactcaaagaaacgggtatagagattgatcgccaggaaggttagtccgaagccgcgcagcattccgtcatcggttttcaggctgataaaaatgcagacgccggccgctacggcaaacagcagcccccacggcaggagtcgcgcctggctcacctggtaccagttgtctgcgtcgtaattgccgaaaatcgacatgatccatagcgcaataaacaggtacgtgaggcccatcgccttgctgacggtaaacagctgccgctggcgaagcagggattgcgcgccgtagcagagcgccagcagcgcgccgccgaacaggacgaagcgaatcgggtagttcatgcccagccagtaggcgccccaccccgagacgtagccggtttccgcgccgaaccagttgcccagcgccagcagaaaaaagagccacaccagcccggagcgggcaatatagccgatggcgccgtaaatcacgcatccggccagaaacagcggtgcgatatggccgctgccgttatccagccgttcgccaagctgccatagcgccacggcggtaaagacgacgcccagaaacaaaatcgcctcggtgctgtagtgccactgcgtctcccgccgctggcgacgaaaaccccagccgtagcagacgactgccagcagcgcaggcagcaggatccgcatcagcgccgagtggctgaacaggctcagcagccacgccaccagctcgctgtcggcgaacagactgcccagggaaatcagcacacaggccagcgcggtccagaaggcatagcgactcaggcgccgccagtcgaagggggagacgcgcatcgtttgcgccagccgctggctgtccgagggggttaactccccgctggcctgccaggcattcagcgcgcgctgaataatgcgctgctcttttcgggttacgttcataggcattccttgagactgatgacaaacctgttttcgctaatatgctcgcctttctgccgggcagcggctgtcgccctccccggcctacttaaccatttatatatcagattgttactccttaccgtaagcccgcgtaagcgcagcgccgccgagcatgatatcaggcacggagccgctttattgccgggtggcggctggcgccttacccggcctacggtccgtagcagccagccgttaacttacccacttgtgcgactgaaactgccggtgttgcggcctcaacatcgctgagacgttcccggcaggccggggcagcccgcatggatgcgggctgagggccgtgttttgcacggacgcggcctcggcccgacccgaagcctgcagggataagtcgaaggcaccacgcagtggcgatgttgctggccggagcccgggggtacagggggcggcggcgactggccgccccctgtgcgctccctgccccatgagtgacataacgcagaagactaaccgggagcgcaatgtgcgctgaagccacagataacataaaagacttcccggcagggctttgccttcccccctactcccggagggagagggaaccgtccagcagcgccggccgggcaatacccgaagatggcacattgccagccatctgattccctgtgattaatgttggtccagccacgccagcgcctgctcgcccgcctcgtccatcggcaggtagaccagcaggcgcgagccgttgcgcggcgccgaataccagtacatctgctgcaggctgaatcgcccgagctgcgggtggttaaaatgtttaatctggttttccacgccgcgcacctcgtagcgctgatgccacagcgcttcaaactccgacgaggcggcgaaaaagcgcgccagtttgttttcccacgccggatcgccgcggtgctcggccatcgcggcgcggaaataggagacgaaggtcggcagcacatcgcgattttcgatccggctgcgccaggtctcatgggtcagatagagataaatgcagttgcgatcttcttccgggagggtggcgaaatcgatgcccatcaggcggcagaagctgtcgttccacgccacaatatcaaagttcggtttctgaatgctggccggctgcggcatcaggctgtccagcatccggcgggtgccagggctgatgccttcgcacaccgtcacctgggtggcttccggcggggtcagcccggcgagcacgaacagatgccgggtctccagcggactgcactgcagggcattcgccacccccaccagcaccgcctccgacggattcacctcccgcccctgctccagccaggtgtaccaggtaacgccgacgtcggcgagcatcgccacctcttcccggcgcagacccggcgtgcgccggcggcccacccggggcaaccccaggcgctgcggatcgaggctttcacggcgggcgcgcagaaaggcccccagctgtttgcgtcgatcgtccggcacggcgatcgtcgactcccgttgcggcatcgtggtcatcacccctccagcatagtagtgccaataccagtatagacaggaactggtacccgtttaatttatcggtaatgctacgtcggtctgctgaatgacgcaatggagaatcccatgaatacgtctgctgtttcacccggccgcgccggtctgttgctgctgctgagcggccagatgctgccgcttattgatacctcgatcaccaatgtggcgctggacgccatcacccacaccctggcggccagcgccacgcagctggagcttatcgtcgcgctgtacggcgtcgcctttgccgtctgcctggcgatgggcagtaagcttggcgataactatggccgccggcgcctgtttatgtggggcgtcgccctctttggcatcgcttccctgctgtgcgggatggcgaacagcatcggcgccctgctggcggcccgcaccctgcagggcgccggggcggcgctgattgtgccgcagatcctcgcgaccctgcacgtcaccctcaaaggccccgcccacgcccgggccatcagcctgtatggcggaatcggcgggatcgcctttatcgtcggtcagatgggcggcggctggctggtgtcggcggacatcgccgggctgggctggcgcaacgccttttttatcaatgtgccgatctgcctgctggtgctggctctgagccgccgctatgtgccggaaacccgtcgcgagacgccgtcgcggattgactggcagggtacgctgtacctcgcgctgatcctctgctgcctgctgttcccgatggccctcggtccggagctgcactggccgctgtggttgcagctgatgctggtggcggtcctgccgctgctgttcgccatgcgtcagagcgccctgcgccagcagcagcgtggcgaccatcctctgctgccgccgcgtctgctgcagttgaccagcatccgcttcgggatggccatcgccctgttgtttttcagcgcctggtccggctttatgttctgcatggcgctgaccatgcaggagggcctggggatggcgccgtggcagtccggcaatagctttatcgccctcggcgtggcctattttatttcggcgctgtatgccccgcggcttatcgcccgctacagcatggggcggatcctgctgaccggtctggcggtgcagatcgccggtctcctgctgctgtgcgccaccttctcccgcttcggcgtcgccaccaacgccctgacgctggttcccgccacggcgctgatcggctatggccaggcgctgatcgtcaacagcttttatcgggttggtatgcgcgatatcagcgccagcgacgccggggccgggagcgcaatcctcagcaccctgcagcaggcgaccctcggtctcggaccggctatccttggttcgctgttcctggcgctggcccgtcgcggcggcggcaactatccgcaggcgctgattgattttctgctggtcgaggtggccatgatgctgttgctgggggcgatagcgctgtggctacgccatcatctcaatcgacagccggcgacggtggcctcgtaataccggcggcggtaatttgcataatagctatccagcggtcatcatacccgctggatattcaggagacgttatgcaggaattaatatcgcaaattgccgccttaggaatcgaaataacccccacccgctcgctgatgattatcttcggcattatcttgttcaccgccgtggtcgtgcatctgatattgcacaaagtggtcctgcgcgcatttgaaaaacgggcgctggccagcagccatctgtggctgcaaatcatcacgcagaataaactctttcaccgactggcctttaccctgcaggggatcatcgtcaacgtccaggcggtgctgtggctgcaaaaaggcagcgaggccgcggaaatattaaccaccgtggcccagctatgggtgatgatatatgccatgctgtccttcttctcgctgctggatgtcattttaaagctggcgcagaaatttcccgccgcctcacagctgccgctgaagggcatattccagggaattaagctggtgacggcgattattatcggcattctgattatttcgctactgataggtcagtcgccagcgatcctgattagcgggctcggcgccatggccgcggtgctgatgctggtgtttaaagatccgatcctcggtctggtggccggtatccagctctctgccaacgatatgctcaagcttggcgactggctggagatgccgaagtacggcgccgacggcgcggtgatcgatatcggcctcaccacggtcaaggtgcgcaactgggacaataccatcaccaccattccgacctggtcgctggtctctgactcgtttaaaaactggagcggcatgtcggcctccggcggccgccgcatcaaacgcagccttaacatcgacaccaccagcattcattttcttgatgaacaggagcagcagcgcctgatccgggcgaagttactcaaaccctatatggattcacgccacgaggagattagcgcctggaaccagcagtacgccggggagcaatcgatcctcaacgagcggcggatgaccaatgtcggcaccttccgcgcctatctgcaggagtatttacgccatcatccgcgcatccgccaggatatgaccctgatggtgcgccagctggcgccggatgccaacggcttgccgatcgagatctactgcttcaccaacaccgtggtatgggcggaatatgaggggatccaggcggatattttcgaccatgtcttcgctgtggtggatgagtttggcttacgcattcatcaaacgcccaccggcaacgatattcgcgcgctgaccggcgccttctcccgctgatcctcagacgctggcgcggtctatcacgcgccagtccatcatcacccgttcgacggcagcgtcgggatcgtcgatgcgtttcatcagtagagacaccgccgtacggccgatcgcccgggagggctgttcgacggtggtcagctgcggggagaccacttccgccagctcggtgccatcgaagccgatcaccgcgatatcttccggcacccgcagtccggcctgggcgatagcccgcagcgccccggcggcgagggagtccgaaacggcaaacaccgcatcgggcttctcgtcttgcgacagcagctgctccatcgcccgtttaccggccgccgcgctaagatcctgcgcgtaggtcacctgctgatacgccagaccgtgcacgtgcagcacgcttttatagccgcgctcgcgcagacgggcatagcgatagctgaggtcgtgattaatgagcgcgatgcggcggcggccgctatcggccagtcgggacaccgccccctgagccgcctcaacgtcgttaatcccgacgcaggagatgctgccggtgtcggcatactccgcgcactgcacccagggcgcgtcgccaatcatggtggtcagttccggcaggctggagagcgcgttcatggtaataatgccgtcgaccattttgccggagagcagctgcaggcccgaggtcgagcgggccagatccgacccggagttacacagcagaatgcgatagccattcttctccgcctcttcttctatccccttcaccacctcggcgcaaaaggggttagcgatattggagaccatcaccaggatcatattgctgcgggcggttcgcagctgacgcgccagcaggttcggctgatagttgctctctttgatcgcctgcagtacgcgctcacggtttttggcttttaccgtatcgctgttgttcagcacccgcgacaccgtggccaccgagacgccggccagacgagcaattttctgaatagacataaaccctgcacttcctgcgatagaggtggatcctgcaggctatcataaatgagcgcagcccgcgccgctagccgggctgcgtgtgaactgggagccttacgcttttgcgatgccagggcgttaaccgcttttgcaaaacatgacgggattgattagcacgcttagcgggctatcatggtggcgctgatgtaatttcgcaaaatgcaaaactcactcgggtatgctacggcattggtatagaaatggggtattttgagcgcaatgaaaatgattattatcgcagcggcaattatcaccgacagtcagggacgctgtcttttagtgcgtaagcggggaactgaatattttatgcaacccggcggcaagcctgaaatcggcgagaccccgcacgcggcgctgatccgcgagctggaggaggaactcaacttcagcgtctcaccagaagaactggtccaggtaggccgtttcactgatgcggcggcaaacgagccaggtcatcttgtctctgcggatgtctttctgatagcaacgaacagggtaagctttacaccgacgatggaaatagaagaagtgatctggtttacgccgggtcaggatcggcatattaagcttgctccccttaccgaaaaccacctgctccctctgctgaaaggggtgtaaccaccccaaacgcatcgaaagttttggctcatttatctgcaagtaaaaatccacaccatcctcgtcttgaagtatttacggctacctgtaggcagagccaatccatgcggccccctaactctctccgtgacctgtttgtccgctttgtaccatcactattccgcacagactgctgacgagttctccttaaacattaacgcgtctttatgcatgggcctctgctgttttgtacgccagatcatattttgcccgcgccttctttcactctgagcatcaaacaacgcaacttcaccttacaaaaaagggaatgcccgcctgaaaaaacacaaattaaaaaacaaattcaaaacaaaatgttaacaaaatagtgtgtggctgcgctttttttgacttattgtgctgtttttttttaaccaattactgctcattcagcgagaaaattcctggtcgcaatggataattcttaagctgcgttcgctataaaattctgcccattaagatttttcttattaataagagcaggttagtatgattcgcagtattttttgactttaagaatttacacatttttcagcaaaataaccaccttgaaattaaagttgtcacatttattaactagtcataatatagccacatcattgaacgataaggtaagacaatatagggaaataaatcgacacatggttccacagaaatatgagaaggcatactgtattagctgccagtatcagtgcgaaatctatccacgacctacgataaaatcgattagatgtattgaaactcactattgcgtatggcctgataaaaacatctacttaaaaaatggcgtgcattgttttttaattaacaagcattacaacttctctaattctggatatgtttttgttgatttttctcgctacaacatcagattattcaccaatgataaatggattgaatatctgatcaaaacaggattgcggatagttttgattgccgacagattagcgcaaccactggcgttgtactggaaacaccgttgtcagcaaatactttcaattatctataccagcgatacccgaaatgagattgaaaggaaaatacatctttcctttctcggccaaaaagatggacgcggctatcgtcagaaactaagcgctcaagaggtattggtactcgatcttttacttgcagagaagtcagttaaagagatagcacaagaattgcagatggcagaaaaaagaatctacgcaatcaagctcagcttgcagaataagatgggaggcagagggaagttaaacattattttatctggataaagtcattatcagtatttatagcaataactccataaatggaactaacttaattattctcaggaaattgaaaatgaaaaaaatcgtattagcgggtgttgcggctgcggctcttatctcttccaacgcaatggctgacgtaactgcttccgccactgcaagctgggatgcaagcgcaacgaaagacaccaccagcgcgctagttgtcactccgctgaaatccctgaatttccagtacgcggaagggattaaagcgtttaactctcagaaaggcgcttttgacatcaccatccagggccagtctggcgcgactgactttacgctgacctctcagatcgtgagcaacaccctgagccgtaccactgacgcctctactctggccgtcggtgtgaactggaacggcaacgcgctgaacaaatccaccccggtaacgatgattgatacttccaacaacatttccgcgggtctggatgcgctggctgtcgcgaccgccttcgcaggcgccgatcgcgtcagcactcagggtaacttcgatttcactatcgactccgcgacttctgacggcagcactgccgctgagttcaaagatttaaccgacggttactggagcggcgacgttcgcgttcagtttaatgcggtctggactatctaatcaggtgtagccaacacctgtccggtaagacaaggaggcctcggcctccttataaggatgcgccatgaaactgaatccattattcctctctctctttttattcaccgtgacgccctcctcccatgcgattaatgtcggagacgtcacctcaataatggggccggatgcctcgactctggcaaaagaaatcattaataccaccgatacggcgcgttacgttagcgtcagcgtggagcgtatctcatcgcctatggccggtggcacggttatcccgatggcgaacagatcggaattattatcaacacccgccagcctgatattacccggcaatgctaaagagaactttcgttttttttacaaaggacctcaggataaccaggaacgttactaccgaatatcctggaccgatgagccggtaaccgagtttgaagccagtaaaaagaaaaaacagggcgaggcaacgacttcagccattattggtaccattctggtggtcgcgccgcgagaagaaagatttgactatcgtcgcgataatgacacggtaaccaatactggtaacgcttcattccgtgtgatctcctacggtccctgtcgtgataaagcgaaggatgagggacaaggctgccgtgagcgatattatgtcatgcctggtgtcagcgtaaaaataaagcataccgatctcaccaacaaaaaaacgcgaattggaatatggcacggtgagcaatatataaatgtaaactgagtaacatcatggataatcttggttatgtcaaagggacgttgttcgctgggttattgattacagtaaaccagggttgggcagctaatgctacagcgccagtcaaagtcagtaactatattattccttcggtatttgctaacgcgttatatcagggcatgtcggtccctgtttttattcgttatgaaggcgataatagtacccaacgcagtcagcaaaaaatcgctgatgccatcctgaccatcaaggataatgagtttcgcctgaatcagatcgcgctcagcgatctgccggagcgaaccgaactatcacctcagattaaatcattgctcaacgagatgcaggataaaagcatcggcgacggtcagcgcgtttatatcaacaaagacgcctcactttcacttgatacgcgttccttttatctcgagctgacggttaaccgggcagccatgcaggccgctattttgccgcgtaccaatatgcttggagaatctaccgcccagaatctctcgagcgtgctgaattactcgatggggagctattacaacaaatatgagaataccgataacgccagcagctatctgacgctggataatacctggtcgctgcgggaacaccatctgaactttaacggttctctttacgggataggtaccggcaaccaggagagtaaactgtatcgctcgatgtacgaacgtgactatcagggacgccgcctggcaatgggtatggtggatacatggaatctgcaatcgattgccagcatgagcgccctgaattccagccgtatttacggcgtcagctatggcaataaaagcagttcacaaacgcaggacaatacgcttgctctggtgcccgtcacggtgtttctcccggccgctggtgaagtacacgtctatcgtgacggcaaactgctcagcattcaaaacttctcgatgggtagctacgagctcgatacgtcgcgtctgccatttggcatctacaacgttgatatccaggtggtagttaacgggcgcgtggtcagcagccggacggcgaacatcaataaaacgttcgcccgtaaatcgagcgtgaccggcgatctctcgtggcaaaccttcggcggcagcctcgaatacaacaagatggactatcgccacaaatacaacatcaattatggcacaaagaatacatggatagccgggatcgccgcggcaaccagccaaccctggctttccggcgtcaatctgaaaaccacgctctacggttttgacactaacggcgtcaatgaaacggaagcgaacgttattttcaacgacgcgttcagttttaaccagcaggggctgctcgctaccgacggcagctggcagagtacctccacctttaatatgagtttacccgacggttacggcaacctgtgggggtcgcgccagtacagttccatcggtaacgcgctcccgatgcagcagaatgactacgtgaccatcggcgccaatgccaatctgcgcaaaatcgcgccgttcctcggtacgctgagcgtcagccgaaccaataacaaatataccggcagcacctataccaacgtcgattacgaccaatcgctgttagccaatcgctatgcgaccgtgtcgctgcgcgccggtattcagaactatcaatacaacaaccatgaaaatctgcgtgataagtacgtcaatattgatgtctctatccccttctctacctggctcagcaccggcgtgtccagccagaatggaaacatgctggcgaacgccacgctgcgcaaaagctttgacgacagcgctattacccaggtgggagcatcggtttcgaagcagattaaacagaataaaaataacgatagccgctatcgttccgacgattacgccgccaatggttacgtcagctatgacaccaaatataacgctggcaccgtctccgttagccgctcatcgcagcacagttcaaactacagcctgagctcgcagggcagcctggcctggacggaaaaaaatgtttatgtcggcaaaggcactcaaaccgcaggcctggtggtgaataccaatttcagcggcaaggggaggatgatggcgcagatcaacggccagaactacccgctgaccggcaaaagcaacttcatcagtcttccgccctacgccgaatacaaggtggagctgatgaacgacaaaaattcggaagacagcgtcgacatcgttaacggccggcggaacaaagtcgtgctctatcccggcaacgtcagcgtgattaacccggaaatcaaacagctcgtcaccgtatttggccgggtgaaagatcgccgcggtggttactacgccaacgccgatatacataaccacattggtaaaacacgcaccgacgaactcggcgagttcgccatggacgttgataagcgctatccggtgattaccctggtcgataaattcggcggtatttgcgaagtggatttggatctgcgagaagcgaaaggtgccgtatgggtcggtgagatcccttgtgagatccaacaacaaacggcatcagtgactggagatattaagaatgtctattaaaccccaggccatcatgctgctggccggctggctgctagccgcgccggctatggcacttaccgctactaacgacgggagcggcagcaacacctatatgtttatcgacaacgatgtcgatgatgaatatttcatcaccaccagctccctgtccccgcgcttcactggagccaatatctggacgaaatataaaacgaaccagcgtagtctgggatacatgggcaactcaggctggagttacagcaaccgctattttgacctctggatagacaactccccgattaaccaaccgtttctcgggctccgctgcatgtcaacgggcgcaaactgcccggcttcgggctatatccccgccgatgtactcgacaaagacggcttctatcacgcgatgtccggcaacagcgtggccaatggttactacggcgccggggtgctgagtcagtcggcatatgagtattttcgtaatcggccggtgggaaccatcgatagtttgcagttgaatctttgctatatggactccaaagctgattatgactttgcttccggcgttcgctgtaaagatctccccagcggaggaaagtgggtttactacacgatgaacctcgaaaaggtctcgcatctgaccttaaacagtaccggcgcgatggcggaagtgtggattgccagcgacggtacgccaagcgtcaacctcggctctgaattgtgccagatgggggtggtagggagcgcttcggggatcatttgtaaaatggtgtcttacagctttcaggaaaccaaaaccctcaccacttcgcttgatttccggatggttatcgatacgacgctgcttggattttccccttcttcgtctgacgtcaagtacagcggtgatggcgccagctggaccaatttcggctcgactagcacctataacaaggtcttcaaaccgtcaggggagtacatctatgtctttctgtccaacgcctttttcaaaaaggctctcaaggcgggcacagatttaaccaacaaagatgagctgttcaccttctattttgataactccgtgactcctcaatcaggttattatcagtttacgccatcaacactaattaacatcatcccgcgtgaatacggcatcagcattatcgccagcgacgggagtgctcatccaaaagcatctggcaagatcggtagcgaaacgcccatcacctttgagtataaagttactacctccgcgtcgcgtcaggcggacagcatcaccgcccaggtgactggcgacgccatcaacatatatggtcagccatactgtctgtttacctcagcagacgagacgctaaaagtgccggtcccggccttcctcgaatggacttccgctgccgggaacgcggtaagagtgcgcaacagctgcggtgaaaaccccgttgatatgaccaacgccgcctgggttcagacggcctggaacgccaacgtcaacgatggtttcttttttaccaccacgctgaaactgctgtttccgatggatgactcgcattcacagttcactactgatggtcatgactggatgggaaccgtcagcgccaccggggatgtaaaagtgaccgccacctgggttggcgtcgatcggggggtatgatgaagaaaatgcttttcatcggattgtgcgggctgtgtattcagcccgcttccgcggtgtactttgattccatcatttatgatatggatgccagtaaagattttatctcccggccgttagtcaatgatacaagcagcaataacttatataccatctcggcttacaaaatcgccaggccgggcaacggtaatgaacggccggtgcccggtcaggacaaagacctggtctggtcgccgctgcagttcatcgtacaggccaatggcctggagtattttaaactctattaccgtgggcctggagatgacattgagcgatattatcgggtgatctttaaagaaacgcccgtcacggtttttccctggcgcatggagcagaaaaaactgaatattgtcccttcggtatcgatgagcaccattctcattgttcgccctcgaaaaacgcgtttccagtatgagatcaacgaagccacgggcaccattaaaaataccggcaatacctatttcagagtcattctccagaaaggttgtaatggtgatgatgaaagctctacacagttttatatgctgccaggggatagctggacaggccctgaggcgaagaatggcaacaggaaatatatcgtcgcattaggccgttatcataaattaggtgatggctgtttcatggatgcgccgggttaatcacggctaatccagcgcggggatagtatgcctgaagcgcagattgcgcaggcgattgagcccgccgaacttcttgcataaagagtattgaaagcggtagacgctgcgggtatcgcacgccatgatacgggcgatatcctggctggaatgcccctctgcaagcaggcacagcgtcttcatttcatgctccgtcagcgacggtgtgcgcctgcacagaaggttccgccccagcataacgcgttttattttattaattaagttgcttaagtcactattcacttccactactgcccaggaaaacccggaacgcagcctccaaaaattagccattggcatcatgtttttatctgctatcagaatgattttcagaccactatcccgcaatttcctggtccagcactcattcagaaagtacaatatatttcccaatgaaaaatccaccaccactataccttcaggtacaaaacaggtgagttcacggaaaaccagatcatttactgcccgtttaaaaaaatagttcctgtctggccacacagaaaatttcttctctccacagagagtgcgctctattttatttttcgcttcaatccggcagtttaatccacaggcgatacatttaatctcacagttacaccctctcattataatcacctcgcaagtcattaaaaaatttagtaaagatacataagcaatatcaaacactctgtaaacaataaacccaaggtgtattttatttactataaaataataaaataaagattaatgtataatacccttgcacaagcagataaatatcaacacaagcaatcaaaagtttaaaaaaaactgaaatttaacctcatactgttcctatgtttagctgccatgcttatgcattacagctaataaatatcatatttattattttgatgcctgtcagtaaagataaacgtgatatgcaaaccagcggctaaatcagtctgggcctgctgtcggagcgatggaggatgtgaagagtaaataaaatttgtttctgccgtagcgaactgtgcgaggaatgcctgaatcattgtgaattcagcatgaacgttgcttatagggataaggatccccgccgtagcccgataaacacgtctaagggttgccagcttatccggtgtggaagagcgcagccatagaggtggatcctgcaggctatcataaatgacctctgattggcctgccagcttggcgcgaaagcgtagctcagcgagacggtgtcccgggaaactattaataatcagggcttctctcccgccccgttaacgcgcatccttttgccgtttcatattctcattagcgcaggaggcgcaacagaccgcctgcgccccattttttcttttatgattaaggatgatatccccatgaggctctccaccgcggttctcgccctcagctgtgccctggcaacgataaccggctgcacctcgtcaaaatcgtcaccggaacgccatgcctacgccttcgtcgcccaccggtccgattttgtcggcggcaacttcaccgtcaaccgccaggaaaattaccgtttaaacctgccgacctttacggcgatgtatgcccgcggacagcaggataaagccgctggcatgagcgaaagcgatgcccgccgcaccgcggaagccatcaaacagcaggcggcgcagggcacccgcaccgagcacgccttcaccggcaatgccagcgacaaatgggataatgcgatggaaaataaagatgccgtcctgttcggcaacgagctctccggtgcctatctcgacggctatcttggggtgaaataatcctgcgccccgcctgcgctcagcgttcgacgctgacccagcgctgctgctgatggcttttgacgatcgcctcgatgatatacatcacatcggcgccgtcgtcgaaagcggcgaagcgccgggccccggccgccggcatcttcccggcgcgcaccgcctgataaaaatgccccatcatattcttaaaagcgtccggccagccctcaatatggccgccggggtaatgggcgctgtcagcgatttccgtccgcagcaggctcgggtcatcgctgagcaggcgatccggctgctcgcggtggccgatccacagccgctggggcacttcctgatcccaggccagagaacagaggctgccgttaatctccaccgccagacggtttttccgcccggcgctcacctgagagaccataaagctgcctttgctgccatcgtcaaaacgcaacagcaccgagccaaagtcctcggtatcgacaggccgcgtttcatatgcctgcgcctcgtgaacggcgctgaaggtcgctttgccattgaccggcgctttacgcgttggccagacgatagacagatccgccatcacctcgacaatccgccgaccggtcataaactgcacggtatcgcaccagtgggagccgatgtcggccaccgtccgcgacgcgccgccctgcgccgaatcgacccgccagttgtagtcggtctccagcagcatccagtcctgtaaatagctgccgtgggccgcgaagattctgccgacctcgccatggcggatcatcgccgccgcctgctggaccatagcgaactggcggtagacgaagctgacgccatgcaccacgccggcccgggcggcaagcgccaccagctcccgcgcctcctccgccgtcatacacagcggtttttcggagaagacgtgcagcccggcggcgaggatctgccggttaatctgggcatgtagatggttcggcgtacagttatgcaccacctgcagccccggatgggccagcagcgcctccacgctgtcgtaggcatgggcaatgttcaacgcctgcgccttgcgctgcgccgcctcaaggcggctgtcgcacagcgccaccacctcgacatctcccagccgccggagcgcctccagatgcgccgggccaataaaccctgccccgataatcgcgacctgaatcatgttattccctcccgccggcggcaaagtcatcgaaggcccgtccggcaacgggaatgatatggcggcggataaactcgctgccctcgcgcgcgccggtctcactatccttcaggcagcactcccactccagcaccgcccagccggcaaaatcatattcggtcagcttactgaacacccctttgaagtcgatctgtccgtcgccgggagagcggaaacgcccggcccgctgctgccagggctggtatccaccgtagacgccattgcgcccgttgcggcgaaattcggcgtccttgacgtgaaacgctttaatacgcgcatgatagatatcgatataggtcaggtagtccatctgctgcagatgcaggtggctcgggtcatagagcatattgcagcgcggatggttatccaccagcgcaagaaaacgctcaaaggtcacgccatcgtgcaggtcttcgccggggtggatctcatagcagacatcaaccccctgctcgtcgaagaggtccagcagcggccgccagcgccgggccagctcggcaaaagcctcatccagaagcggctgattatgcggcggccacggataaaaaaagggccatgccagcgccccggaaaaggtcgcgtgcgcctgcagccccaggcggccggaggctaccgccgcctggcgcactttctccaccgcccagcgctggcgcgcctgcggatcgccatgcagcgccgccggggcaaaggcgtcaaacgccgcgtcatacgccggatgcaccgccaccagctgtccttcaaggtgagtggacagctcgctgatcaccagcccatgctccgccaggatgccgctgacctcgtcgcagtaggtctggctcgccgccgcccgctcgacatcaaaaatcgccgggtggttgcaggggatctgcaatgccttgtaccccaggccggcggcccactgcgctatccccgccagggtgttgaacggcgcctgcgtcccgataaactgcgccagaaaaatgcccggtcccttaatcgttttcataccccctcctgaaaaattagtgcggctctttctcgttgtactggaaagagaaaaggaaaatcagcgcgataaccgcggcggccaccgccgggatccaccagaaggtcacccaggcctgaggcacgctctggccggccaccagatggttatacagcgcgccggagatctgcgagcccagcagcatgccgatcccgtaggtgaacatcacaatcatgctctgcgcctggccttttaccttctcgcccgccacgcggtcggtgtagataaagccaacgacaaagaaaaagtcatagcacacgccgtgcagcaaaatgcccagatagagcaggaagcgcccctcctcgctgactccgagagcgaaaaaggcgtagcggacgaaccacgccgccatgccgatgagcagcatgtatttcaccccgaggcgacggaacagcaacgggatcaccagcataaagacgatctctgacatctgaccgaacgacatcgcggtgctgacatctttgacgccggcatccgccagatacgacgcggtataggcgtaataggtgcctaacggcacggaaattaaggtggcgcagagggagaaaatcaggaaatggcgggttttcagcagcgcgaaggcgtccgcgcacagcaggtcgcgaaactgaaccggcatgcctttggccggcgccggggtgtgcggcagcgtcaggctgtagagcgccagcgcgaccgaacagagcgccgccagcgtgaagatgccggtggtatcagagataccggtcaccccgatgcagatcccggcgataatccagccgatggtgccgaacacgcggaccaccgggaaggttttatcgacattggccaggctgtggaaggcgatattgttggtcagcgccagggtcggcatatagcacagcgtatagccgaacagcaggccaatcagcagggcgccgttctgcgccacccgcgcctgcgggacaaaccacaggatcgccgccccggccaggtgcatcaccgccatcaccttctgcgaggcgaaaaagcgatccaccagcatccccagcacaaagggagacaagatggaggcgatcggcccggcggagaacgcatcgccgatcagcaatgacatctcatagcgggtcatcaccagccccagggtcaccgaccagctgccccagataaaaaactgcataaacatcattaacgacagccgcggcaccagaaaacggtggctcacgcggacactttcccgaccttctgttgttgtgaccatgttgctcgccctcagaaaagtaatcgattacaaaacagctcaaaacaaaagtaatcgattacaaaaagaagttcgccaggcaaatgcgccgcctgcgaagaggatcacaataaaaaggcaggcagccccgccggacggcggggcatctcgcttacgccgggcggcgcaacagtttgaaggcgataaacaggaacaggatccacaccggcagcaggatcgccgacagacgcatgccgtcgatagtgcacatcagcgccaggatcagcccaaggaaagcaatacagaagtagttgctggcgggcgccagcagcgctttgaacttcgattcgcgccctttgcggcgctgggcggcgcggaacttcaggtgcgccatacagatcatgatccagttcagcaacaacgtcgccaccaccagggccatcagcagccccagcgcttcatgaggcagcaggtagttcagcaccaccaccagcgaagtgataatcccggagagcagcagggagttcaccggcacgccgcgcttgctgacgcgggcgagaaatttcggcgcattaccctgcaccgacaggccgaacagcatccggctgttggagtacacgccgctgttatacaccgacagcgaggccaccagaatgacgaagttcagcgcggaggccaccaggttgctgtccagattatggaaaatcatcacaaacgggctgctgtcggatttgatctccacccacgggtagagcgccagcagcaccaccagcgaaccgatatagaacagcaggatacgatagaccacctgattgaccgctttgggaatgctcttttccgggttttgcgcttcggcggcggtgatgccgataagctccagcccgccgaaggagaacatgatcaccgccagcgacagaataagtccgtgccagccggtggcgaggaagccgccgtgtttccacagattgtcgaacccggctttgctgccgccgtggccgccgaacagcatccacaggccgaaggcaatcatgccgataatcgccagcaccttgatcagcgcgaaccagaactccgcttcgccatacaagcgtacgttgaccaggttgacggcgttaataatgatgaagaaagccgccgcccaaacccaggtgggcacgtcgggaagccagtactgcatatagatcccggcggcggtcagctccgccatccctaccagcacgaacatcacccagtagttccagccggagagaaagccggcgaacggcccccagtacttataggcaaagtgggcaaaggaaccggatactggctcttccaccaccatttcgcccagctggcgcatgatcagaaaagcgacaatcccggccacggcgtagcccagtaagaccgccgggccggccatttgaatcgcgggaccaatgccgagaaacaggccggtgccaatcgcgccgccaagggcgataagttgaatgtgtcggttctgtaaaccgcgatgaagcgtcgggccactttccgtgacggtctccgacgacgttgacgcgtctttcacgtcgttcccctgtgtgtttttgtgaaggggcaccttttatcacttaggggggattgtcgcaagttgcgtggggcgagcgtcagccgcccgccccgctttttttagcgtcagaagtcgtagctcattgagacgcggacggtacgcggatcgccttcgaacaggtaagtaccggtatcgtcaatgccagaccagtacttctcgttggtcacgttggtcaccccgacgcgccagatcatttcgttctggtcggcgttcagacgcatacgatagcgcaggcctaaatccagggtggtgtagctatccagcttcttggtattggccgcatcggcatactgcgagccgctatgattgacgcgcgcggtggcggtcaggccttccaccggcttgatgtcatattcggcgccgagtaccgcgtagaagttagccaccccgatggcatctttaccgtcggttgcgccttcagcggttttagtctgtttggcatccagccagacggtactggcgttaagacgcagtcccagcatcggctcgccaaagacgttcatctctacgccgcggttacgctgctcgccgtcgaggccgtaattgccagcggtatcggaaatggcgttcggttttttgatttcaaacagcgccagcgatcctccgatcgtaccgtagtcgatcttgacgcccacttcgtcctgcttcgagtgcgcgatcccggtactctgcccggcattggccgccgtcgtcggcgccacagagcccggctgcagcgcttcggtatggttagcatacagcgacagctgctcccacggcttgtacaccaggccaaacgtcggcatccagcggctttgggtataacgcgaagaggtatcttccagcccggtggcgttgctgtagttgcgcacaaccactttctgatgacgagcagcggcggtaaacagcactttatcgttaaagaagccgagggtatcactcagcagccagccctgcgtacggctgcgcgaggtgaccagcggatcgtggtagttgccgccaaaataggcgttatccggcatcgccacatcatggttgtcatagatattagtggtcgggttcctggccgacatccgccaggcggtcgcatcggtatgcacctgcgccgcatagccgaggttcaccttatgcgaaatcgcgccggtattgaaatcgccgcgtaccccgcccatgccgctgatcgcgtcgataatgcggttagtatccaggcggcccaccgtcgcatcgccgtttttattcagaagcttcggcgcgctgtaggtaccaatttcatgcgaatgctggccgccgagggcgctgtataccgtccagctttcggtcaggtcatattctgccttcgccatgccgaactcgctttcaatatcgctatagccccacttctggctgtagtttttgctgttgtccggcagcgccggaacgaaatccacgccgctgatattgacgcccatcgtaccgccgtggaacgttttcttctgatagccgaaatcgagcgaggagcggaaacggtcgccgcggtaatcaagccccagcgaagccagcgtggtacggcgtttatcattatcgatagcgccttcaccctcgcggtgcaccaggttgacccgggcgccgaactggttgttgtcgccgaaacggcgccccaggtcgagggtgccgcccacctgagaatcagaggtatagtcgacgccaacgcgtgcggtcggcagatcttccgcccgcttcggctcgaggttaatcatcccgccgacgccgctgctggccgcgccgttaagcaggctgttagcccctttgaaaatttcaacgcgctccagcatctgggtgtccatcacctgacgcggcaccacgcccgccaggccgcccatcgtcatgtcatcgccatcgagcttaaacccgcggattcgataggtctcggcgaagttgccgtagccctgtacggcctgcacgccagcgtcgttactgacgacatcggcgatagttttcgcctgctgatcctgaatcagcttcgaggtatagccgatgacgttaaacgggacgtccatcgctttttgttcgccaagcatccccagacggccgccgtgggcgatctggccatcgaggaatgccggaaccaccaggtcgccgccggatttaaaatcgctggtttcgttagcctcgacgatgagggtctcttcgccaggctgcttcgcggcggcagcgtccgcggccatcaccgtttgactggcggcgccgatggctaaggccagcagcgttttacgcagcgggaaggatgaatagtgcgtggtgtgcataatttgccccatggatgaggataaatgaatcaaagggcccgtcgccggacccgttatttttattgcgcgttcaggtcgatacgtacgacgctgtccgggcctttagtggagtggtctttattgaagggctgtttgacggtgacaaacagcgtctgaccatcggcggaaagcagcaagctgttgggattggccggcagcgcccagcttttcttcagcgtgtagcggctggcgtcaaggctgatgaccttgccggattcacgctgtgaaatataaatttcgtggcgtttcttattgaactgcaccgccagcgaatcgccgacgtcgagctgtttaagcagcttgccgctgtggatatccagcaccagagtggttttcgctttcgagttgtcggtcacgaacagacggccggtgtcgctatcttcggccatattaagcagcagcgccggcttgtcgcccagcggcttccagcgctgttcaatgcgttggttacgcgggttgatcaccagaatttcaccgctgccgttagcggcgtacacgcgaccggtttgcgcggagtagtgcaggccggtcatccatttaccggtatttttaatccgcgttttcagcttcagggtagtggcgtcaaccacccagatttgcgccgggtcggcgaccgcgccaacgtagagagtattattcagcaacagcagctgacgggccccataagggtgacctttttcattgcgctcgctgaacagcaggcggttttttaccttgccggtggcggtgtcgatagcgctgatgccgccgtccagcgaattgctgacatacagcgttttaccctccgcagagagctgtaaagcgaagtttttcagatcggtatgcgtcaggccgatggtattgagggtgtgcggatccagtgtgtaaaccgccccgccctgtacatttttaaagccttcagcgctggcgacgtacagcgcatcaccctgcgggcttaacgccatctcatacagcccttccgctagctggcgctgcagcggttgcgccacgttagggactggcgagtcgacaaccggttgggaaacggcagaggaatgaggcgtcgcgcagccgcttaacgccgcgctgatggccagcgtcaacgccggaagtgtgtatttcattggatcaaccctataaaaaatcaatgacccgatggacgcgcagcggccgatattgtgtgtttccagcctgctgtctttacgtcaccctacgccttcgcgactcttagtgaacgactcactggcgcagctcgaaccttgccaaaattacgaatgaaaaagagaatgagaactatactcattatctaatgtcaaacaagtcctggcgggcaaaaaagataatctgctgattttttttacggcaatggcggattaggaggggaagaaaggatccgtgacgggaaaagcgtcccggaagcgatgccgtgcaccgcccgggttgcgggccagaaggcacacaatgtgttgcctatctggcgcaaagcgacacatgacagcgctatgtcgctgaacggcgattaatatcgcaccatcaccgacttcagctccgtataatcatcgataaacgcgctgccgaattcgcgcccgatgcccgagcccttcatgccgccgaacggtaccgccgggtcgaggaaggtatgcatattgacccatacgatgccggcctcaatcgcctccgagtagcgtagcgcctgacgaatattatccgaccagacgctggccgccagtccatacggcgaagcattcatccgcgccagcgcctcttcttcgctgcgatagccaataaaactgcacaccggaccgaaggtctcctcgcgcatcagagtactctcttcgctgcgcactttaaccgcggtcggctgcaggaaatagccctcccccggcagcgcttcgccgccgcagacgatggtatcgccctcgtcgcgggcggtctgaatgagccgcaaaactttgtcatactgctggcggttggccagcggccccatcagcgtccgttcatccagcggcgaccccggcgcaaaagcgctgagcttgtctttcagcagcgccagtaccgcatccagttttccctgcggcagataaaaacgttccgcagcggcgcaaatctgcccctggttcaggtagccagcttcaataatgccgttgaccatcgcctccggcgtcaggtcatcgaggaacagcgcggcgtttttcccccccagctcaagggtcacccgtttacctgacgcactggccgactgctggactttttcaccggtggccaccgagccggtgaagctcaccttggcgcaggccggatgcgtaatcagccgctgggcaatctcgccgccggcgccgttgaccacgttaatcaccccatccgggatacccaccgcttttgccagctccgccacgcgcagcagcgtcagcggcgtatattcgctcggcttgaggacgatggtgcagccgcagaccagggccgccgccagcttccagatggcaatcatgatggagaagttccacggcacgatgccaaccaccacccccagcggctggcggcgggtaaaggcggtatatttctccccggccatcgatggcagcgagacatccagcgtttcaccggtgactttccccgcccagccggcgaagtagcgcaggaacgccaccgactggtccagctcgagcatccgcgccagcgtgatagttttgccagaacagagactttccagctgcgccagcgcttcgcgatgctctgccagcgtgtccgccagcttcagcagcagcgcgccgcgcgccagcgtcggcatctcgcgccactgactaaacgcctggcgggcgctctccatagcgcgatccgcctggtcactatccgccgcggtgacctcggcaatcgcctgcccggtcgccgggttgatcaccgcgaacggcgcgccgcggcccgcctcacgttgaccggcaataaactgcccgtgcggctggcgtaagaaggcggtcacttccgccagtaaggttatctcgctcatcgtcagcacccgtttttcagcaaagttaacccatcacagcacggcttcccgccgcagcctatcgttctaaagaacgtcattcttccggacgatattcaacgcccgcgcggcgtgctgtgatgagggtcttgagccaggcaagaccacagggtaacgcgatgaacatcaagatcgatgcgctgaactactacggcgcgacgaagaaatatcacctccatttcccggcgctacgggaagatattgaagccgatgtggtaattatcggcggcggcttctctggcattaacaccgcccttgagctggcggaacaggggatcaccaacgtggtagtgctggaggcgcgccatctcggctacggcggcaccgggcgcaacggcggccaggtgatggccggtatcggccacgatatcgaagcggtaaaaaagcacgtcggcaaagaggggctggagacgctgtttaaaatcgccaacctcggcgcgggcatcattcgcgaacgcatccgcaaatacaacatcgacgccgatttcgtgcccggctacggctatctcgcctataaccagcgacagcttaaaacgctgcgccagtgggagaaggagtttaaagccgctaccccggatgaagagatcgaactgtataccggaaaagaggtgcagcaggtggtgggctccgaggtctactgcggcgcgctgaaacatatgggcggcggccagatccattcactcaatatgctgctcggttcggcacaggccgcccattcgctgggggtgaagattttcgaatcctcgccggtggtggaagtgaattacggcaaacaggtgcgggtacgcaccgcgatgggcagcgtcaaagccgccaaactgctgtgggcctgcgacagcttcctcaacaatatggagccggagatctacaacaagacgctggtcacttactcctaccaggtgtcgaccgagccgctctccgatgaactgatcgaacgcatcagcccactgcgcggcgccttcagcgatattcgcccggtaattaactactaccgcgtcacccgggaaaaccgcctgctgttcggcagcgccacccgctttgtggagtatacgccgaacgatttcgccgcctggaaccgcaccttgctggcggaggtcttcccctatctcagggatgtgaagatcgattttgcgtggggcgggccgatggcctgtagcgccaatctgttcccgcagatcggcaccctacgcgatcacaacaacgtcttttacgtccaggggtactccggcttcggcgtcaccccgtcgcacatcgtgtgcaaaatcctcgccgaagggatcaacggcggttccgaccgctatcgcctgctgagcagcatcccccacgcgaccatccacggtcgtgacagtctgcgcttgctattagtcacggccggaaaactgatgcatcaaaccgccggtttctggaaaggccggagttaaccaggagaacgctatgcacgcttttaaacttaaacacccggtacctgatctgcagccgatcggcagcgtcagcctgctcggcgcgacgccgaccgccggcgacccgcaggtagcgggcgcgatgatctacggcgagccgcaggacgcctttacctgcggactgttttcgtccactgaggggagctttaccatgacctatccgtttaccgagcacgccaccgtgctggagggcgaagtggagctgaccgtcgccggcggcgagccgcagcgctttgcgccgggcgacagctggtttgttaaacagggcaccgaagtagagtggaaaattctgacgccgcgctttgtgaagcactacctggcgaacgtcgagacccgctaacaaactgataatgcccggcggcgcattacgccttctccgggctaccaaatcgcgcagcgctgtagccccggtaagcggcagcgccaccgggggtttgaggccaaataaaaggcaggccgcacggaccgtaggccggataaggcgcagccgccatccggcagaaacaggcgcaacgtggcaagacggatggccccggttttcggggtcatattgtttatccgccgcgacattcatcgactgcgtcacagaatcatgcgccgccctccaccttccggacgatattcgttgagcaggatgcccgcctaaattatgactatccgggagtggcgctggctattccctgctaccccattattgtgcagaggttgactatgtttagtaacagactcgccagccatcttgagcgcggcgtcgtcggcttcccgaccaccctcgccagctccgtcgggctgatcatggccagcccggtgatcctgacggtcaccagcggcttcggcatgggcggtgataccttcgcgctggcggtgctgctggcctttattatgatgcaggcgcaggtcaccacctttgccgaggcggcgacgctcattcccaccaccggttcggtgtacgactatatctcctgcggcatgggccgcttcttcgctatcaccggcgcgctgtgcgcctatctgatcgtccatatcttcgccgggacggcggagacgatcctggcgggcattatggcgctggtgaacttcgagtcgattaacgcccagatggccgctcaccagaatacctggatggtgggcgtcggcatggtggtgattttcggcttgctcaacgccatcggcgtggaaatcttcggcaaggtcgaagtggtgctgaccttcggcatgtggaccacgctgaccattttcggcctgtgcggcatttttatggcgccggtgactcatctttccggctggttcggcacgccgctgaacgttagcgatatcaacggcctgttcggctatatcggcatggcgatgtttatgttcgtcggttgcgaactggtgacgccgatggcgccggagatcaaacaggcccaccgcaccataccgcgggcgatggcgctgggcctgctgggggtcgccagctgcatgtttatctacggcgcggcgatcaaccgccaggtggagaataccgtgctcgacgcggccaacaacgtccatctgctggatacaccgatggcgatcccggccttcgccgaacgggtgatgggccacgccggccagtactggctgggggtcgggctactgttggccggctgcgccaccatcaatacgctgatggccgccgtgccgcgtattatctacggcatggcgctggacggcgcgctgccccgtttcctgacctggctgcatccgcgctttaagacgccggtgatcgccattgccatcggggtggcgatcccctgcctgcacgcctggtatctgaacggcgatctggaccgcatcgtgccgctgatcctcgccgcggtctgcgcctggggcgtcgcctatctgctggttactctgtcggtggtgatgctgcgcattcgccgcccggacctgccgcgcgcctaccgctcgccgtggttcccgctgccgcagattatctccagcgtcgggatcatcatcgctatcgtcaatatcacgccgcccgggatggacagccgccaggtgctggtgccgttcggcataatgctcggcctgaccgccgcttacgccctgttctggacggtgtgcgtgcagcgcgtcaatccgttcaagccgctggtagtggaagaggtggttgagcgcgccatcaacaattatgaaaaacagacccgcggggagatgacgccagatgtcctccgtcccctggtttgaaacgccgttaatgaacgcggtgcagcgcgatctggcgggctggcccagcgaaaagctgagcgaacgcagcgcgctgctgcgcttgaacgacgccaccgccgtcaccttcagcgtgcgtcagaagcggctgtttatggccagcattcacagctgcgagtttgtcgtcgaggggccggtgacccggcccgctcgcggcaagatccgcgcccaccaatccggctggctaaaacgcctgccaatccgctttatcggcagtaaagagagcgcggaactcgccggctatctcaacggttttcctaatctccagcagaccttaagcgagctggactaccgccgcttttcgctgacctttaatagtagcggctggcgctgcagcattgaaccctgggccgccagcgaagtggtctgtaaaatgccgccgctgcgccgttatctgcggctggaagcgcagcagcggatgctgctgctcagcgtgctggcgatggttaatcaggcggtaagtcagtggatgcatgagtgagccggatgcccgcgccatcacgcgccgatcagactctccagaggaatgccgaactgtgcgtgaagccggcgaatcatcgggagcgtcaggttgcgcgtaccattgagaatttcatacacgcgattcgatttaccaatcgccggctccagatctttgacggtcagcccctgctgctccatgcgaaacttgattgcctctatcggcgtcggcggctcgatgggatagtgctttttttcatattcagcaatcagcaggcacatcacctcaaaaaaatccccttccggcgtgtccggcgcaggttcattatcaaaaaaaggttcaaccgcgcgtaacgcggcctcgtaatcttgttcagtgcggataggcttcacattaatcatttacttcctctctatcgtctcagcgtttatctcgtcatattccttatgcgaaccgataaacttaacgaacacccacccccgcagataaacaacggctacgattaatgtagcagcaaaatggaaatattctcttagagataaaaagcgaaattgttgtcattaagtagaacaaacttgattatgaagataaataagcatcaatgcatcctctggtcgtggtcgacctggggggatgctgatgtcgcagtcaattttcaatgtgaagtcatttactggtatatttttgaggtgctacctgaaatatcattgtacatgtcagccagcatgtgtactgatataaacgcagttgttgccagcaaattcccaaagggtttcaattttatgaaaataaaaccatcctgttaatgtattaaaagttaatgaaatcgacacgcggcactaagctctcattctctttaatcatctccaaagaacgatgataaatgatctcaatattatactcgaactgctgagaggtcgttttccgatccgacaggctgtcaagcagccactgaatctcatcatagataagtctatcaaacagtctgttattctgcgcagtgaaaagccactgtttcataaagacttttgagttgataccatccactaagggaagattgcattttctgagtttaatcgccaaaagaaagcagtaataaaaatgattcagaataataagttcatgcaacggtttcatataaaacccatacataacatcagtaataatgagaaatgcaatcttccacacgatctttaggataacgcttcgacgtcaatcaggaccttaacgaaaaattcatcccgtttataaagccccggcaaaaccgatggaacatctttcagtaacacccgtttagtcattaatggggaaacatcaatctgcccggtactgaggtaatgaatggatgtctgccactcttttcctggaaacggagcagagattgagttccatgaaccaatgaccttcaactcattgcgcacaattttttcaaaattcagccggggtaaagcaacgtctccgtaagggatgcccagcagcaccaccgtgccacctttggccgccagaagaagggatgagccgatcccggtcacatttccagatgattcaaaaacgacatcaacaccagcgttatgggtaatctcctggaatcgggaaaaatggttcttatctttgacgcagaatgtttctgttgcccctgttttcgccgccaaggcgagtttcatttcgtcagtgtcaaatgcgaatacgtctcccgcaccacagttttttgcccattgaacagccagtaagccgatagtaccgcacccgacaatagccacactgcttccaggttttatatcgacctgccgcatgccatggacaaccacactggaaggctcaataaagcttgcggtagcgaagtccatcgagtcaggtaattttaggacattttccgctggcatccgaatgtattctgcaaaagcaccattgacctggcctcccagcaccttcatatccgtacaccgggcataattgccctgttgacaataatcacagtggaagcagggaaaacagttacaagctgtgacgcggtcgcctttcctaactgatgtcaccccactcccgacactatccacggttccggaaaactcatgcccccatgtcagaccggggttatatgatccaattttaccaaatcgtgatatatcagacccacatatacctgccgtatgtattttaattagaacatcatttgcattttcaatctcaggtttccgcacatcttcaagacggacatcctgtactccatacagattcaatgccttcatagtgatctcactcaatggtttcagggttaaataaaaacatgtgaaaaaaagttcccacaaattttattagttgtgtgcgccacgccccagacttcatcggtgagctattgtgccacaccttaaagtaatttaattcccggtgagtcaataccgtcatcattgacaagtaggctccgttgtaaccatttttgagccacagcattacctccctttcgtggatcaatataaacctatcggggataacacacattcccgggaattaaatagattattcttctttctcgccaaagccgctggcaaataaccctttaatttcatccatcagaacctgttcatcaggtccctcacagatgatttcaatactggacttacctttaatgccggcgcctaacacactcatgagccctttgatcaccgtttccttgccgttattcaccaaggttactgaagactcatatttcttcagtgttttgacaaaggtggctgccggacgtgcgtgcagacccgtgctgttaacaacacgaatattttctctaatcatattttacttccaactctactagctgaattcagcacaatgggttatcaggaggcacggttcatcatcagaattttgctgtaaacatccgcttctacggcatctttcgctcccgacattacttttgccaggttcgcttcgttgttatttttcgtccatgcttgcccaacagtagtaataaatgccttacgcaggtcgctggcaatatttacctttacgacattatattttacaaaactacggatgatatcttcatcaatgccggaaccaccatggataaccagcgggcatgggcatactttggcaatctcctgtagcaacggaatatcaatacgcggaatatcttccagaccgtgaacgttgccgacggaaaccgccagcatgctacatccagtctcttgcacaaaacgacgcacctgattgacatccgtcttacagtcagcctcactgacgtggtcatcttctttacccagaatcgcgccaagttccgcttctacaggtacgccaaacgatttacagaaatctacagcttctttagtaaacgcaatattttcttcatacggcaactctgcaccgtcaatcatcactgaggtgaagcctgcgcgaacagctcgcttaacatcatccagctctttaccatgatcaagatggagactgaccggcacatccatggtcgcagcgcgtttacgcacgatttcatagatatagtcataacccgacagttttgcgtttgtcggtgctatctgaataaagttaggcaatcctgaacgctcaatcgcgtccagaatcgaaatagtggtttccaggttagtggtgttgaaggcacccgccaggacacgtttttcacggatacgatcgagcaggatattaccgtttactaatggcatgatatttacctctttcttcgttgaagtactgtacccaaataatatttatctgatttcagccagacattgccaaaatcaaatggcatatgattatcgaggaaaaccagttgttccagatgaagcaccggtgcttcttcatttacttccagatagtgtccccgttcactacctacaattttcgcggcatagcgactttcagagtattcaattgttcttcccgtcatggtttcgacggtctggaacaggttatgcttattaaaatcaacctcggttattcccggacacagcgccatattgattctattttcaattaacatgaccctttccccatccacactacggatccgtttaaggaaaaaaatgggtgtaccaggttctatctgcaacttttccgccactccttttgaggccttctcgatatatgaatcaattacctcggttgtaaaagataagtgctgactttcaagcgactctgcgaaagaaagcaatccttcccccagtgagtaagagatattctcttttttcacaaaggtcccctttccctgaacctgaaccagcaacccctcattgaccagcatggtgacacctttctttaccgtgccccgactgacctgaagtatttccatgatctgattttcagacgggattcggtcccctttccccagttcacctttataaatttttccgcgaacccactcagaaacctgcatatataatggaatttcagagtcttgcagtatggtactcatgtggtgcttctcctgtgtagatcatctgtatacaagtatgaacaactcttgataatacagcgttttcaaaaattaaactatatgaccagcttcacagtttcagccccacctattgcgtccgtgtggcaacactttccttcccgcattgagcccccgtacagatttacgggggcgcatccgtcatgcgtcagctttaataatgactttcagaacgtcattatccggattggaagcaaactcaatcgcttcaggaatacgggacagcggccaggtatgagtgatcatgtccttcgtattgattttgtctttttccacaatctcaatcgcttctttcatttcataaggcgtcaatgaataggtgcccacgatggaaatttcatcacggaacagcctgccggcatcaatttctacgaccggatttttatcaaatggtgagaacacaacaattctccccccacggcgtacaacattgacggcctgagaaaccagggacgaaaccccggcggcgatgatcaccacatccgggcctttcccttgggtgatttctgccacccgggtttcgacatcttcgtttgccgggtcgatcgcatgggtgacccccaccttcagcgccagttcacgcttgaaccgggaaaaatcggaaacaattacggtcgaggcacctttcagggccgccaactgagcgctgaccagcccaatggtcccgcagcccagtaccagcaccgtatctttcggatggatattggacgatttcaggccatgcaggcagcaggcgacaggctcaatcattgccgcccgatcccagtcaagactatcgataattcggtgcgtcaggtgctcaacatgcaggcgtgggatacgaataaactcactgaacccgccgggttccagattcgttttcttgaactggtcgcatagggtgaagaacccccggtcacagtaatggcagttaaagcagggaacatgaatagcggtcaccacccgttcacccacccggtagcgggtgacatccttgccgattttcaccacttcccccgacacttcatgaccgaggatcaccgggccggtcactgtctggtgctgagctttatgaatgtcggtaccgcacaggccacaggagtgcattttgatgagcatgtcgccgtcgccaatttctggcacttcaacatcttcataccggatatcatttttactgtagtaaacgctggctttcattagttaactccattacagagacgctcagtacgcatcttggattcataaagcggcttatagacctgagtgtaaattgcctgatagtgcgccacagcatcaatttccggcaggtagcgacaggtctgttctccattagtgccaggcaaacactctacctccacacctgcggctttcgctgcaagcatggcggcccctttgctcactgcctcattgacattgcaggccaaaatttcccggttaagaatgttggccttaagctgcaaccagtacgggtttttacaggcagccccaatcacattcacaaccggataatctttcccagtcagcgtttcgtataaatccagcaagtttcgcagttcaaagcacaacccctggaacacaaaacgcaggatatcttctggtctggacttatcatcaaggccgtaaattaatgcgcgggaccaggtgtttctgtccggcggaccgctgccccgcaaatggggaatgaagacaccatcaagcgcgccagccatagccatgtcctgctcgttacgcagtgtatccaccatcctcaggaaggcgggcatatcgagctcaaagagatttctgaaccattcaatggcatacccggcagacggcaatgacgcatagagggaatgaagccccggaagcacatgtacgccatttgacacccgagcacggaagaaccgcccggtgttgttgaccgcttcggtcaccaccagtaatccctctgtcgttcctgtagaattcaggatctgatcttcgctggtcaatccgacggccacagaaccgcacatatgatcatgcccggcgattgcgacacgggtattcgttgtcagcccggtcagttcggaaacaccagacgtgacggtgcctatagcctcgcccgcctggaccaacggactgaataaagaaggggaaagttctgcagcattaatcagctgttcatcccagttcaactcagcgatgtttaatgccatcgtccgtgatgccagagaatattccgaacgtttgacaccggataatttaaaggcaatgtattccgccaggcataaccattttcggccttcacttgcattactgatattatccttcagccatttaattttattaatactgtaatttgaatgcgctgggataccggttatttcatatatatgctcaatatccatagccgaaataatgttttccaactgctgtttcggacgggtgtcataccaggtcagtaccgggccaatgacattatcattatcatccagcaaaacaccggcttcccccacactggcgaccgctactgcgctgatcttccctgcattatccaaaatattcgttatcgttctgagaccatggagaaccccgtcccagataaggcgaacatcaaaatctgtatcttctccgtccacaattttgggcgttctgaaactatactgattaattaattccagagaaggaatttcgaacaagcacaccttacaattggtcgtgccaatatcgattccgatcgtatacatcactttccccttttcttgcaagggactacgtttgtttgattcagaagcagaaccctctgcttctgaatagacaggcttattttgctaaaggaatatcagccgaggctgcttcattttctgccacctcttctgcttttagctgttttttagtgacacgatatagccacagacacagcaggaaaataacgggaataagcaccagggcaatggaatttccttcaaatattttgacagcccagaaacgatacgggttaccaccgtccagcaggctggaaatttcaccgtccgttttcactgggaaattcatatcccgggcaatcttagtcagtatcggcgcagcagccgaagccacatacaggtttaccgccaggcatggaatgccaatgataaacgccctgacaatattgcctcgacaggccagtaccaccatggaaatcggtacccaaatgttcgccaggtcacccagtggcagcaaacggttacctggcagtaccaccgccagcaataccccgacggggataagcaacagcgcagttgacagtactgacggatgccccacagcaaccgcgatatccagaccgatatacagatcgtgacggtcaggataacgttttttgaggaagctacgcacagcgtcagacagcggcagcaggccttccatcagcaacttaaccatgcggggcataatcagcattaccgcaccgaggctcatcgccaggttaaggacacctttgacatcatattctgccagcaagccaatccctgcccccagaatcacacccagcatcatcggctcaccaaagacgccaaagcgcttctggatctgatccggatcggcattcagtttgttaatgcccgggattttatcgagcaccatattccccagcacaccgatcgggaagaaaataaccgatgacagtgtgggtagcgaaatccccggcaggttgaagtacttctggatcatcggagcacaccagtcagccatcacaaaggtaatcgctgcggtgacaccggcaattagcagcccaaagaagaagttgcccgtcaccccgtaaaccatggcgccgaccatcgagaaatgccagaagttccagacatcgatgtcaaccgtcttggtccagttcagggttagcatcagtacgttaataccgatcgtcatcggtacaacaaacggtgcgacctgagaggcccaggcaatggctgccagcggagtccagcccaggtcaacaaccggtaaatcgatcccggtgtggctgaccatttctttggcagccggccccaagctgtcgaccagtaaaccaaagaccagaaagatgccgatgaaacccataccgatggtcagcgccgagcgtaatgcccggctgaaacctgtctgaagacacattgccatgataaatataattatcggcaacatgatcgtcggtccgagccccagaatatactggacggcggaaaatactttatccatcatgctcacctttattgtttcaggatggctacgattttttccagtaattcttcttcgccaaatccggtcagcaaaggaaggccattcaggaccggtgttttcagttccgtcttaaccgcggatgtcacgataattaaatcagccatgccatcctgtttaccaatcgtgccgatattggactgaatgggctcaacattaataccctgacctttgcagtactgaaccactttttcagttgctactgcagaagtcgcaataccgctggtacaggcgaagataatttttttgttcatttcagactccaggttttaattagggtaacaggataataaaattcacgcttacaatttattaataaagactcttggccagaagctccataacatcatcttttgattttgcccaaaggatttggtccatttcattgctgcgctgaaaaagcgatattagcttcatcaaaaattcaagatgtgcatctttttctttgagcagtaagaagaagatcacattcactttcatggtgcagtccgggtcctcagcctgattaaagacgatcccctcaggacaagtgactacgaccagtttttcttcccggacatgctcgacatcaacatgagggatggcaacacccattctttccagttgcattgctgttgggtgattttcttctcgggcaatcaatgcctccgggtagctcggttctacatagttttttgaaagcaacaacttgctgacataattgaacagtgtatttctgttcagtgggggctcattcaggagaatgagttcatgttcaagttttgaatttaacgacatcgcgtttggcctcataaagtctgtcaatgtcatatgatttgaacagtgacaggtatacttgtctatgtacaactatgttcaacctgtctgaaagttactcttcaccacacgattaacgcaaccagcgtcgttaagatttgagtctgaggtcacaaaaaaatctttaatcatttttgccaacatggcataacgcgaaataaaaacattaaaaatcaaatgattaattttattaacgcctagagatttgccatcagctttgcccattcagcaaaaccagaatccgcgttacggcattccgttgtcggaacatgctctgcccgctctgaacagtcagacaatatacttaatttctgttcacccctgctctgacgtttcaggatcgccaagtaatggaatttcggctctatgtgacttcttcaatggtcgcagttaatgattaacttgatgaatttttggccgattaccaccgatcctttacattatttccgtatatgatgttgatttgtgcggtgaaatggaatttgaatatgctttgactgcgttttcaaaaggtgagaactgccaattcattggacttacgaatatgctgcaggaagtgtggtttgagtccgctagtaaacggaaaaatcctaccctaagtctgtttcaaaagcagcctatcagaaagcttagagcttgaagtggacatcagccagaccttaaaagatgtccaccttagccattaattatttataggctaagtaatagtttttccttatttcctcagcaagaatcagtatttaacgcataccctttacgagagctgagccgcgctggataagccagtcccagcgcaataaaggacagaacagcgaccgcccagttcggtgaggccagaccaaaaccagcggcaatagtcacaccgcaagcctatgcctccagcacatttcccagattaaacatgccaatattgactaatgcagccatcgtaagcgggttatgttaatccaagccgttgcgccagccgatcgatagcctgccgttggaactgcgcaaactccgtccgcggctgctgctgttgaataaattccagcagcggatcctggacctcggtgcggatgccgctcagggcttccatcaccgccaggccgcagaacggcacgtaggactcggcgtagccgccctcgtgcaccatcaccagtttcccgccgcacaggcgatccgccgcctgctggacctgttcggtcatcgcccggaagctatcgctgtgcagctgcatccgcgctaatggatccatggcgttggcgtcatagccgcaggcgataataatcagctccggctcaaaacgcgccagcgccggaataacgatagtttccagcgcatagcgccagctgtcatcccccgccccggccaacagcggaatattgatgttgtaaccttcgcccgcgcccacgccgcgatcgtcctcgccggcgtagcccggcgggaagcagccgtcctgatgcaaggagatagtcagtacgtcgtcgcgctgcaggtagatatgctgggtgccgttgccgtggtgaacatcccagtcaatgatcgccaccttgcccagccccagctgcgctttcgctcgctcgacggcaatgggaatattggcgaggaaacaaaatcccatcgactggtccggcagacagtggtgtccgggcgggcgcgacagcgaataggcgttatccagctcccccttcagcaccgcttccaccgccgcacaggccagcccggcggaaagacaggcgatttcataactgcccggccccagcggcgcctctttgccgagcatgccgccgccgttatcgcttatcgccttgaagcgctccagatagctgtcggggtggatccgccgcaggtcctcaaggctcgccggcgccgcgctgcgcagcgccagctgcggcgtcagcccggagacatccatcaggtttttcatccgccgtttggtctctggcgattcagcatgaccgccgccggcgggcggctgtacccacccgcccaccggcagcgtcaccgcgtgcagaccggtactgtgccagaaacaacgttcatcaaagaagaaaccggtttttcttttcactctatcctcccgtgggctaagccttcccggcggcggacgccgccacaattaaaatcagtgacagcagcgcgcagacgcctgccgccgccagcagcgggtcggcgctggcgaagtgttgcagtaaggcccccgcaagcgccgggccagccgccatgccgccgccgatcaccagattgatgctgttcatcagccgaccgctgttatcgagcccggccacgcgggcgagaataaagggcagcacgaaggtccaggtgaacttaaacagcagcgccgcgatggcgtaacgcaccagcagcggctggccgatcagcagcccaacgctgacgatcaacaggccgtagcccagccacaccggtaaacgatcggcccgccgggtgccgcgcagggccgcgccgccggcgccgataatgccgcaaaccgtcgccgccgccagcaccagaccgacctgcgtcgggctcagccccgccgcgctgccgatggtgccgataaaggtccacacggcgctgaggctgatatagaaagtgagcaccgccagcaccgccagcgcctgacgccacagcgccgtcgacggctgctggcgggagactgaaagcggttgaaagcgcggagggaaagcggataccagcggcaaacagcagagcatgatggcggcgaggatcagatacaccaccttcaggccaaaggtcgcgaacaggccgggcagcgccagcaggccaagcatccctaacagcagttgcccgagcacccagaaggcgtagacccgcgacgggttcggcgttccggccgcgcagctgatgcacaaaatcatcaacgtgccgcccgccagcgaggcgataaagcgcgccgccagcagcgtctcgtactgggtgaccaccgccgaggcgaggttggcggccagaaacaccaccccggccgtcagggcaacccgccgccagtcgaggcggctcatccaccaccacgccgggagcgtcgccaggctcatcgcccccagctccgctgagaacagccagccgatctgcccaggttttagctgccattcgctggccagctgcgccgctaccgccggcgcggtcatcagaatacccggcgcaatagcggcaaaaatcacgatcgccgccagcaaacgcagggacaccaccagcccggcgggccgggaaagcgcattttcagtgagaggtgtactcgacatcgtagggcgtgctccggtcaaaaaagcctccccccgggggatcctccagggagtgatacccacaggcatcaggaaaacgccgtgctgccacggcgcgcgcgggatgcgaaagtcagattacagatgcagcgtacgctgagcggccggcatccaggttcgggaaaccagttcggtacgattgaccacttcggtcttggcgaaaatattgcgcaggtgcgtttttaccgtcgagagcgagatatccagctggcgggcaatcagcttattgctggcgccttcgcgcaccatgccgacgatttcccgctctttcgccgtcaggatggcgggcaaatcatcttcttcctgcaggcagtcgcgaatggccagctctaccagcggcagcaccgcctgggcccgctggcgctcttcgctggagaaaggcacgtcgcgcatcagcgagataccggcgacgatccgccgctcgcggcggataaagatctcggtcatgtcgcgcacgttattcggcaacataaattcatgatagtaatgccggttgcggtcgcagagccgcggcgtcatcgccgccacggtggtgttctggtggctaaagtgcgacggcagaagcggatccagcggctggaagttttccagatattgttggtgcgtattatcggaaatattatgcaatatatagttttcgggttttaaacgattatttactcgataaaacaccgctgaagttagtggaattaactgggaaatagtctgtaaacaacgggctattatcgcatcattacggctggcttttaacaaagcagacatgatagggcctccccgtcgagatgatggtacatgacacatggatgactactgataattgaagcatacatttcacatttaagtaacacaatcattaacatattaacaatgtgatagccgttacaaaattttcagcaatacattgttatataaagcatttaaaaaacaccccggccatgctttacgatagcggcgttaaaacataaacaaataagattaacacccggcgtacctgcccctggtgataaaaaaaccctattcccgacgcgtgattctcatcctaaagaacgatggatttttgttttttttcacttatacccttaacaggatgcaattaattttcgccgcggcttaatcatgtgattacgccagacccgctgttgccaaaataatatcaacagcaccggtcattaaccgaggataagccgatgctgaatatcgccgccctgcgccagcagcaaattccgctggccgctgagccgcgctcgccggtgccgtttcatattctgatgaagccgattggccccgcctgcaatctcgcctgccgctattgctattacccgcaggacgaaacgccggtcaacaagatggatgacgcgcggctggagcagtttatccgccgctatattgccgcccagcccgccggcgcgcgggaaatcaactttgtctggcaggggggcgagccgctgctggccggcctgagcttctacaaaaaagcgctcgccctgcaggcgcgctatgcccccgacggcgtgactatcagcaacagcctgcagaccaacgggacgctgatcaacgacgcatggtgccgactgttccgcgaacatggttttattatcgggttgagcctcgaaggcaacgaagcgctgcaggactaccatcgtccggataaacgcggccgatcgacctggtcggcggcgctgcgcggcattgacctgctccatcagcatcaggtggactttaatctgctggtggtggtgcataacgagatggcggcccacgcggcggcgatttatgaccggctggtcagcctcggcgcgcgctatctgcagtttcagccgctgatgagcgaaggcgcggccctgcgcgaaggataccagctcagcgccgataactggggacgttttatggtcggcatctggcgacagtggcggaagcgctgcgatagggggcgggtgttcgttatcaatatcgaacaggcgtgggcgcagtatttcactcataccagcggcagctgcgtgcacagcgcccgctgcggcagcaacctggtgatggagcccgacggacagctctacgcctgcgaccacctgatcaacgccgaacatcggctgggccgcctcgatgagcagacgctcgccgccgcggtcgacgcctcggtgcaactgccgttcggtcagcagaaaagtctgcgccgcgaatgccagacttgctcggtaaaaatggtctgccagggcggctgcccggcgcatctcaacgccgcaggcaacaaccgcctctgcggaggctactaccgcttctttagcgacatcctcgcgccagtacgccccttttcccgcgaccttaatggcctgaaggcctggcgggccgcgtttgttgggactgcgcatactgcgtagcgccttaccctgatgatatccccctctgaacaggagagtcagtcgtgaacaaaaaagccatggccgcggcggtcagcatgatcctcgccggtggcgcgcacgccgcgcagcaggagcgtccaaacgtcatcgtgattatcgccgatgatatgggctactcggacatcagcccctttggcggcgagatccccacccccaacctgcaggcgatggccgagcagggaatgcgcatgagccagtattacacctcgccgatgtcggccccggcgcgctcaatgctgctcaccggcaacagtaaccagcaggctgggatgggcggcatgtggtggtacgacagcaccattggcaaggagggctacgagctgcggctgaccgaccgcgtcaccaccatggccgagcgctttaaagacgcggggtataacaccctgatggccggtaaatggcacctcggttttgttcccggcgccacgccgaaagatcgcggctttaaccacgccttcgcctttatgggcggcggcaccagccactttaacgacgcgataccgctggggaccgttgaagccttccacacctactacacccgcgacggcgagcgcgtctccctaccggatgatttttactccagcgaagcctacacccgccagatgaacagctggattaaagcgacgccgaaggaacagccggtcttcgcctggctggccttcaccgcccctcatgatcccctgcaggcgccggacgagtggattaagcgcttcaaaggccagtatgagcagggttacgccgaggtctatcgccagcgcatcgcccgcctgaaagcgctgggaattatccatgacgataccccgctgccgcatctggagctggataaagagtgggaggcgctaacgccagagcagcagaaatatacggcgaaagtgatgcaggtgtatgcggcgatgatcgccaatatggacgcgcaaatcggcaccctgatggagacgctgaaacaaaccgggcgcgataaaaataccctgctggtctttttaaccgataacggcgccaacccggcgcagggtttctactacgaatctaccccggaattctggaagcagttcgataacagctatgacaacgtcggccgcaaaggatcatttgtctcctacggcccccactgggccaacgtcagcaacgccccctacgccaattatcacaaaaccaccagcgcccagggcggcatcaataccgactttatgatctccggtcccgggatcacccgccacggtaaaatcgacgcctcgacgatggcggtgtatgacgtggcgccgacgctatatgaattcgccggcatcgatccgaacaagtcgctggcgaaaaagccggtgttgccgatgatcggcgtcagctttaagcgctatctcaccggcgaagtacaggagccgccgcgcggcaactacggggttgaactgcatcatcaggcggcctgggtcgatggcgaatggaagctgcgacggctggtgccgcgcggcctcaccgccggcgacgcgccgtggcagctatttaatctgcacgacgacccgctggagacgcatgatgtcgcggccgaacatcccgatcgggtcaaagccatgagcgaggcctacgaggcatttgctaagcgcaccatggtcacccgggcacagggcaagatgatcgactacgtcggcatcgacagcaaaaccgggcgctatctggcagtcgaccccgccaccatgaagccggtgcctgcgccgcaggcgatccctgtgagcgagatccattaaccaccacggctatcgttcttccgggcgatagccgggacctgacgcgctttttaaggtaatcggaaaccccattacaggagagtgcggatggcgagagtcgtggtgataaccggcggtggaaccggaattggcgctgcctgcgcgcggctgatgcgcgccgcgggcgaccgggtgtttattaccggacggcgcgaagcgccgctgcaggctgtcgccaatgagaccggcgccacggcgctggtgggcaatgccgccgacggcgaggtgtggcgccagcggctgctaccggccatcctcgaccagaccggcgggattgatgccctcatctgcagcgccggcgggatgggcaacagccccgccgccgagaccagcgaccgccaatggcgcgaggcgctggacggcaatctcaccagcgccttcgccagcgttcgcgcctgtctgccttcgctgattgcccgccgcggcaatgtgctgtttgtcgcatccatcgcctctctggccgccgggccgcaggcctgcggctacgtcaccgccaaacacgctttaatcggcctgatgcgctccgtcgcccgcgattatggcccccagggggtacgcgctaacgccgtctgtcccagctgggtcacgacgccgatggcggatgaagagatgcacccgctgatgcaggcggaagggctgtcgctgactgaggcttatcagcgggtctgtcgtgacgttccgctgcgccgccccgccagccccgaggagatagccgaggcctgtcagtttctctgttcaccgcaggccgccatcatcagcggcgctacgctggtcaccgacggcggggccagtatcgtcgatgttcccactctggcgtttgcctaacgccctactctgttcaggagcccctatgacttcagaagccgtatttatccaggtcggcgcgctggccgatggttttgcgccgcacggtaacctgctggctaccgccagcctgcccgcaggcgaaaactttaccttttatgtcgccgggagcgagccgcagcagctggttatcgaagatgagcagacgctaagctggaacggcaagcgcgccccctggcgggcgaccgccctgcgcccggacattctgtttatcgacttccttgacccggagcgggataacgccagcattagcgcggtatgcaacctgacgcagcgcaatgccacgctggtatacggccagctgccggacgaagccgccgcgcggctggacgccttcagccgggtagaacaaggattgccgctgaccgcggttgaggcccgtttcgtcttcgcccgcctggatgcccagccggggccgctgccgggctttaccaccgcgctggtcggcatgcgcaatcagtacacctatagcccgaccgagcgctatgagcacatctatctcaacgacaatttttacgcctggcagtgtctggacggcgtggaaaaggggctggcggatgtcgatcgctgccactatgtgcaggtggcggaggatctctatttgttcgtctggcgggagaaaatcattcccacgctgggggtgatcctcatcgatctgcagcagatgcgcactgacggcaagatcatgggctatcagggcagcgatttcggcgccctcagcaatttcccggtcggcgccagcgcgaagatcctcaacgtcacccgccatcaggaatagtagggcgccgccgggcacgctttcaggcaccgcacccgtcatttcgccgggtgacggctgcgccttacccggcctaccggggcctctcacaggctcacacctcgcaggcccggtaagcgcagcgccaccgggcgatgctatcagacacggagccgctttattgccgggtggcggctggcgccttacccggcctacaggagcctctcacaggatcacacctcgtaggcccggtaagcgcagcgccaccgggcgatgccatcaggcacggagccgctttattgccgggtggcggctggcgccttacccgacctacggtccgtagcagccagccgttaacttacccacttgtgcgactgaaactgccggtgttgcggcctcaacatcgctgagacgttcccggaaggccggggcagcccgcatggatgcgggctgagggccgtgttttgcacggacgctgcctcggcccgacccgaagcctgcagggataagtcgaaggcactgcgcagcggcgatgttgctggccggagcccgggggtacagggggcggcggcgactggccgcctcctgtgcgctccctgcaccatgactgccataacgcagacaattaaccgggagcgcaatcggcccggaagtaacatagaagctgtagccctgctaagcgcagcgcgaacagggacatttccggttgcgccgttattttgccgggtggcggctggcgccttacccggcctacggtccgcgtcatgtatagccttcccccctctccccgccgggaagagggattgcctcaggcgctggcgccgtccagccgcgccacttgctccgcgctcaggctcagcgccgccgcgcgggcaaaactctccacctgagccacgctggtggcgctggcgatcggcgcggtcaccccttcgcggccgatcaaccacgccagggcaacctcagccggcttcgcgccctgctcgtccgcgaccgccgccagggtatcgataatccgcatcccgcgcggattcaggtacttaccaatcccgcttccgcgctggctctgtgtcagatccgacggctggcggtacttaccggttaagaaccccgaggccaggctgtagtaggtcaccaccccgatatcgcggctgacgcagagatcgcacagcgcgccttcaaacgcagagcggtggtagaggttatattccggctgcagcacctgccacgcaggcaagccgcccttacgcgccacctccagcgcccccgccagctgcatcgcatcgaggttagaggcccccatcgcgcggatttttccggcctgctgcaggctgtggaaggcctccagcgtttccgccaccggggtttgcggatccggccagtgggagaagtagaggtcgatataatcggtattcaggcgacgcagagagtcgtcaaccgcctgttggatccaggctttgctgagccctttatggccggggaggccgagatcggagccgactttggtgaaaattttgactttatcacgcatgccggggcgcgcctgtagccagcggccgattatggtttcagattcgccgccctggttgccctccgcccagcgggaataaacatccgccgtatcgatagcgtcaaaaccgtggtcaacgaaagcatcaagaagagcaaaactggttttttcatcgatggtccagccaaagacgttgccgccaaagactaatggggcgatggaaaatccggttttgcccaaaggacgtgtcatcatgccgagtactccttagcttatattctgcttccctcaggtaaccacaggggtcaggagaggaggtcgattggataatcagaaaaggaatcttacggcgggcgctccacgcccgcaggtacactctgacattatgtcccggaataaacatcaaagctaaaatatttgccagctaattttttataggtgccgtcggcaagaatcttcgcaatcgcgccgttaatttcctgacgcagcgcctcatcgtctttacgcaaacctatcgccgccccggcgccaaacagcgtatcgtcctgcagatggccgccgacaaaggcgaattccttaccctgcggctgctgcaggaagctgtagtcggccatcatcccggagagcaccgcgccgtcgatgcgccccgactccaggtcacgcaccacgctatcggccccctggtaggccacaatgtttatcccctgcggccgccagtgctggttaacatacgtctcctgcgccgagccctgctccacgccgatggttttgcccttcagctgttccggcgtattgccttgcagggtatttttacgcgccacgaggaacaccggcccgttatacaacttgtcgctaaaggcaatctgcgctttgcgcttctcggtcatatacatcccggaaaggatcgcgtcgaatttacgcgccttcagcgccgggataatgccgtcgaaattgctttccacccacacgcatttcgcctgcagctgctgacaaatggcgttgcctaaatcgatatcaaaccccgccagcttgccctgcggatctttccattcaaacggcgcgaaagtcgggtcgacgccgaagcggatctcctttcccccttcggccagcgccgacgtcgacgccattaatgccagccatagcaacagtgattttttcattcgcgttcttctccagagattagcgacagtgtttttccaccagacgggcgaacagcgtcgcgccggtggtgataatgtcatcgttaaagtcgtagccggggttgtgcaccatgcaaccgcccttctcccctttctcgccattgccgagcaggaagtagctgcccgggcgttcgcgcagcataaaagcgaaatcctcgctggcgttcatcggcgagaccgactccaggaccccttcgcggccaaacacctccagcgccagcgcccgggcgaaatcggtctcttcaggactgttggttaataccggataggagtcgtaaacctccactacgctgctggcgccatagcttttggcggtaaagtcagcgagctcgtgaatacgcttgatcagcaggtcgcggatttccggcttcatcgcccgcacgctcagctccatcaccgcgctctccggaatgacgttggaggcgataccggcctggaaggtgccgacgctgaccactgccgtttcccccggcggcacgttgcgcgccacaatgctctgcagggccatcaccagcgccgcaccggcgacgatcgggtcgacggtgcgctcggggtgggcgccgtggccgccgtagccggtaatcgtgattttgacggtgtccgccgaggccatgaagttgccggcgtagaagcccagcttgcctacaggcaggcctggcatgttgtgcaagccaaagatgcgttcgcaggggaactgctcgaacaggccgtctttaatcattaaatccgcgccgccgatagcctcttccgccggctgaaaaatcagatgcaccgtgccgttgaactgacaggccggcgaggcgatatatttcgccgccgccagcagaatggtggtgtgaccgtcatggccgcaggcgtgcatttttcctggcgccgtgctggcccagggtaaaccggtggtttcctcgatcggcagggcatccatatcggcgcgtaaaccgatggtgcgcggagaatcgcctttgctcaggctgccgaccacgccggtcttgccgagaccgcgcgtcacctgatagccccactccgtcagcttgctggcgaccagttcgctggtattaaactcttcaagacttaattccggattggcatgtaaataatgacggatagaaatcatttccgcttccgtcgctttaatttctggaattacataatcactcatgccgctctccgggaaataaattaaggacttatcacggtatcgcgatgaaaagtttatgcaagcagcatttctaatacctggaatggacgcatcttatttaataatccattcaccacagcgcaatgaataataaaaatagttcaattaaaaaataaaagtttatttttttgagaatttcccgttatttaccctaccctgcacggccacatccagcgttatataaaataaacgggcagacaattacagaggcttttccttctcgctatcgtcacgctggcgggctgcagcgcgccgatcgccgcctccaccagcggcgtggcgtcagataccgcctccctgccctcgaaggtcaacgtttatcatctgaccgaaaaagaactgtccacccaggcaacaatcaatggttataaatactggccggatactgcgctggatccgtagctttccgcgagtgcgccatcgccggatcaggcttttcctgacccggcgtcgcggagcagcgcatttagtggccgagggcgccacttaccagaatcgaggtgatgatcccggtcgccgcggcgatcagcacatagttaccgtcgatataggaccagtgatggccttccggcgggggcggcaggccgcggtcgctccagtcgcggacgcgatattcatcgccacggaacggcgccggagccgggtggcctttgcggaaatcgttcccgcgccaggcgaaatggtcctgctcatgacgtgccagatcgcgtttgtcatggccgtcgcgatccgggccacgctggtcatggtcgccctgatgatgcgcgtcaggtccgccctgcggtgcatgcccgtcatggtccggaccgttctgccacaccgtgggttgccccggacgatggccgtcgttcgggccatcggcaaaggccgggacgctcagcacacaggataaaattactgccagagaaatcatctttttcatggtacacctcctgattcagctcctttgtaccgggcaaatgtgaagaaagagtgagtaactggttaaccaggacgattcctggcatcggctgtcgggaagaggttgtgctgatggcggggcaataaaaaaggccgctttcgcgacctttattcagacaggtaaaaggacttattcagtcactttattttttaactcttcggcgccggttttggttttatcccagcccttttccgcaccggatttggtggcgttccagcctttttcactgacctctttggtcttatcccaccccttctcggtgccttctttggtcttgttccaggttttctgcgcgccttcgctcacctggctgccgacgctgtcctgcttgccttcggcggcgtgtttcgccttcagctgctgctcttcgccctcgtgctgggcctgatgcagcttctctttagcggtgttggcgttggcattcgccgccgcgacggtatcatctgttgcatgtgttgtcgcagcaaaaaccggagccgcaaccagaatagccgataacgcaatcattgcttttttcataatatcctctctcacgtgtcgtgttatgagtcgcattcaggatggcacaacgaaccggggatgacattaggaattagcctgaaaaacgtcttcgacctccagccttggcagaaaatgctgccgcctcgcgcgccctgtcggcgttggcataatttccaacatgtttgttacattttatgaaatttgcccttgatatacttgccgttgacgtttactcgagaataattctcagaatcattatatttataaattggcaaacggaactcattttatggcaagaaaatcagtaagatcgctgttacttactgcgctgctcgcgacgcccctcctcagctatgcaacccaatatcccctgacggtcacggaccttgacggccggcaggtcaccctcgccaaagagccgcagcgtattattttgcaggatggccgcgacattatgaccctcgccctgctggatcgggacaatccgtttaaacggctggtggcatggaataatctggcgaaaaagcaggatgttgccacctggcagatgctgaaaacgacgtggccccagtcggccacgatccttgacatgggcttcagcgataaagggaacgtcgatcttgaaagcgtcatcgcccgtcagccggatctgatgatcgcccagctgcgcgccaggccagcgctgatggagagcggcgtcatcgacaagctcagcgccctccacgttccggtgctgtttgtcgactatgagatcgccccggcgaaagataccgcccccagcatcgacctgctgggcaaagtccttaaccgcgagagccaggccaaagcctttaccgattactatagtcagcagctgcagacgattcgccagaaaaccgcggccatcacgccgaaggccaacgtcttcgtggaagcgctggccggcaacagcgacgcctgctgctttactcatggccacagcggctggggcgggctggtggaggcggtcggggcgaacaatatcggttcgcagctgctgccgggcgcctccgggttcgtttcgctggagaaaatcatcagcatgaagcccgacgcctggatcatgaccggctcgaagcgcggcaacagccaggtgctgcccctgggttatgcggttaagccagaggcggtgaaggcccaggcgcagatcctgctggcgcgacctggggtcagccagatcccggcggtacaggaaaagcgggcctatggcgtttatcaccacttctataaccacccgtggaatattgtcggcatggaatacctggcgaaagatatctacccgcaggccttcggcgatctcaacccggatgagacgtaccattatatcgtgcgccatttcaccgacctgccggaccagccgttcgtcttctcctggcagcagagcgagtaatccggcatgcgtttaacctccgactccgtgctcgacgggctgcccgccgggacctctggcgtgatgaatgattatcgccgtatcgtgcgtcgccgtctgctgctgatcctcctgctggcgctgttgattgtcgcgtcactgctactcgattttatgctcggcccctccggtctgccgctgcagagcctgtggcagacgttaaccgatccggccagcgccgatccgggcacgcgcgccatcgtctgggatatccgcctgccctatgcggtgatggcgattatcgtcggtctggcgctgggactggccggcgccgaaatgcagaccatcctcaataacccgctggccagcccgtttaccctcggcgtctcctcggctgcggcgtttggcgccgcgctggcgattgtgctcggtattggcctgcccggtattcccggccagtggtttatctcggccaacgcctttatcttcgccctgctggcggccctgctgctggacggcatcacccgctggacccaggtggccacctccggcgtcattctgttcggcatcgcgctggtctttacctttaacgctctggtctcgatgctgcagttcatcgccaacgaagacacgctgcaggggctggtgttctggaccatgggcagcatcgatcgcgcctcctggagcaaagtcgccatcctgctggtcgccctggcgctggtgatgcccctgtcgctgcgcagcgcgtggaagctgaccgccctgcggttgggcgaggaccgggccatcagctttggcattaacgttcgccgtctgcgcctgaccacgctgctgcggatcagcattctgtcagcgctttcggtggcctttgtcgggccaatcggctttatcggcctggtggcgccgcatattgcgcggatgctcttcggcgaagatcatcgcttttacctgcccgccagcgcgctgatcggcgccctggtgctctccctggcctccatcgcctcgaaaaacctgatcccgggggccattattccggtggggatcgtcacttccctggtcggggtcccgttctttttgagcatcattttacgtcatcgggggcaggtatgagcgaccagacattatccgggctgtcgctgtctcacttcagcgccggctaccccagacgcaaggtgatcgagaacctgacggttccccatctgccgcgagggaaaatcaccgcgctgctggggccaaacggcagcggtaaatcaacgttaatgcgggcgatggcgggtctgggcccctgccgcggcgagctgctgctggagggggaaaatctgctgacgcagccgttctcacgtcgcgcagagcaggtggtctatcttccgcagacgctgcccgccggcgtgcatctgcatgtgctggagtcgattatcgttgcccagcgcgccgccggaggacgccacagtccgcagcgccaggaggaagtgatggcgctgctgcgacagctggggattgcccatctggcgatgagctacctcgatcagctctccggcgggcaaaagcagctggtgggtctcgcccagtcgctgatccgccagccgcgcctgctgctgctcgacgaaccgctcagcgcccttgacctcaactaccagtttcacgtgatggatctggtgcgccgggagacccggcggcgcaacatcgtgaccctggtggtggtgcacgacatcaatattgccctgcgtcacgccgaccacgtgctgatgctcaaggcaggccagctgctcggcgacggcaccccggccgcggtcatcacccccgagactctggcggccgtctatggggtgcgcgggcgtattgaaccctgttcgcagggggtgcggcaggtgattattgacggcctggtggacagcgaggcctgaccgcggcgcggggcggttcgtccgccccgcgcccgccggcttagtgatcgagatagatatagttttcccagcttttcatacggatcaggatcttcctgatcagcgacagctctttcagatgatccgagtagaccgccgcctcgagggtagccccctgcggtagagcgtattcggcaaatcgcggatcggtcaccttcagcaccaccagcgcccggccatgggtattgagcgcgtctgtggtcagcaatttgccctgcccctggaactggctctcgccaatcgccggcagcacgtcggccacttctccgcgaaagacggtgcccgggatagccggaaacatcagctccgcgggctcgcctttgtgcagacgctgcagggcgttctggcgaaatgccgcgacgtactcccgcgaggcggcgccctccaccggcacaaaggtcatcagcgggatcatccccagcgcagtggacatggtgcccggccgtaagccgacggtactgacatagccatcctccggggcgcggacgacggtgttctccagctgaaactgcgccttttgcagctgcgccagcagggaggccacggtggtgtttttgcccttcaccaccgagtccagcgcattacgcgcctgaaccaccttcgcctgagccgcgctgacgctggcttcatcggctttccacgtctgcagacgggtatcaaccatttgatcggagaaggcgccctgggcatggccctcccgatagcgggcatactcccgccgcgactggtcgcgctgggccaccgcacggctcagctcggcctgcgcctggcttaacgccgcgtttaaggagagcgcatcctgactggctgcttttatctgcgcctgcagatcgtccactttcgcctggaacggcgtcgggtcgagggtaaacagcacatcgcccttatgcagcatctggttaggcttcaccggtacgctctgcacccggccgcgtacctgcgacacaatcggcacggtgcgaaacacctggttaccgacgtcggtataagggaagttgtagttcatcccgaagatcaccgcgccaatcagggcgataccgccgagcaccgccgtcggcacggtccacttattgaacgggatgcgaaaaactttaaacaccacgatgcatagcgcggcgtaggtcagcaacattaacgtttccattattttgcctccttcgctttcagaacgtccacctcgcgctggacctgttccagctgctggaccaccgtttccagacgctgatgcagcgcctgctgatcgtcggcaatgtggcgcatcccccatccgcggtcttcgcgccacagcgtcgcccagatccataacaagggccacagcgcgtggagggtaaataagctgacccaaccggcataatgaatcgcatcctgatgaggatgacgccgctctttggcgatttcataaggaatatcgtgaataacaatcacgccataaaaaagtattaaggccacggcgatcagaatggccagcgccacatagtccagggtcataaaataactccagagtgcaaggttaaataaataaaacagccagattcaggcgtaacggggccgagggaaaaagcgcgcttagcgctttccctggcggtaatagcaacgtgatggcgtgaatctgccgaatcggattcagaatttctcaggaatatgacggtcgatggagatcagcttgccttttttcaccgtgatatatcccccctcgcgcagcgcggccagcacctggtacacatagctgcgcgagagattggttcgtttaataataaatgccgacaggctctcatgctgacccccatcaatttcgccgcgatataaatagcgcgacagcatcgatttaatggtctgaaagctggtctggctgccacgttcatagtgggcatcaagggcaaatatgcccatataggccaggatcgtggtcagctcttgcatatagcccggcgacgaatgaaagaatattcgctcaaaatcgctggcggttattttcgccagctggcactcgcccagacactgataatagagcgcgaccgacggacaataatgttccagtaatcctaacggcatatgcgcgataacaatcccgaccaggttctgctcatcaccaaaggccaatgtcatttgcccctgcagcagaaagtagagatagcccggctgcggaataaagccctggtctttgcccaaactcagcgtttcactgcaggcgatcaccgccggcagatgcgtagtcagcgtcagcttctggtaccgatcgtaaatatcgccaaaactggggttcatcgcgctacgcactcctttacctttggccaccgcggcggggctaaccgcgacctgttgaactatacctaagcgggtggggaaggaaaagtccagatctggagtggcgaaatattccgcctggctcacattttttaccctcgcctccctgtttcgtgacccaatcgttccgcttaccggtgggctgtgctttaatgagctaaaccggtttaataaagtttagcttagaggagcttgtcgtatgaatggaaaaatctgggtactcggcgatgcggtcgtcgatctcctgcccgatggagagggccgcctgctgcaatgccccggcggcgcgccggccaacgtggcggtcggcgtggcgcggctcggcggtgacagcgggtttatcggccgcgtcggcgacgatcccttcggccgttttatgcgtcacaccctggcgcaggagcaagtggatgtgaactatatgcgcctcgatgcggcgcagcgcacctccacggtggtggtcgatctcgatagccacggggagcgcacctttacctttatggtccgtccgagcgccgacctgttccttcagcccgaggatctcccgccgtttgccgccggtcagtggctgcacgtctgctccatcgctctcagcgcggagccgagccgcagcacgacattcgcggcgatggaggcgataaagcgcgccgggggctatgtcagcttcgaccccaatatccgcagcgacctgtggcaggatccgcaggaccttcgcgactgtctcgaccgggcgctggccctcgccgacgccataaaactttcggaagaggagctggcgtttatcagcggcagcgacgatatcgtcagcggcatcgcccggctgaacgcccgcttccagccgacgctactgctggtgacccagggtaaagcgggggtccaggccgccctgcgcgggcaggttagccacttccctgcccgcccggtggtggccgtcgataccaccggcgccggcgatgcctttgtcgccgggctactcgccggcctagccgcccacggtatcccggacaacctcgcagccctggctcccgacctcgcgctggcgcaaacctgcggcgcgctggccaccaccgccaaaggcgccatgaccgccctgccctacagggacgatcttcagcgctcgctgtgatccccttgggccggttaacggcccactttgctggcgacatcacaattcttaaaccggtttagcaatttttattttcaccgcgttaccgacatgtttaccatatcaactaaaccggtttagcaaacattagcacactcactgatttacctttggatgtcaccaacatgtataaaaaacggaagttagccattcttattgctttgctaaccggcaccgccgccgcccatgggcagacagacctgaacagcattgaagcgcgtctcgccgccctggaaaaacgcctgcaggacgccgagacccgcgccagcactgccgaaagccgcgccgcctcagcggagcagaaagttcagcagttaacccagcagcagcagcaaacccaggccaccacccagcaggtggccaggcgcaccactcaactggaagaaaaagccgaacggcccggcggctttgagttccacggctatgcgcgttccggggtgatcatgaacgactcggccgccagtaccaaatccggcgcttatatgacccccgccggggagaccggcggcgccattggtcgcctgggcaaccaggccgacacctatgtggaaatgaacctcgaacataaacagaccctggacaacggggcgaccacccgtttcaaagtgatggtggccgacggacagaccacctataacgactggacggcaagcagcagcgatctgaacgtgcgccaggcgttcgtcgagctgggcaacctgccgaccttcgaaggcccgttcaaaggctcgaccctgtgggccgggaaacgctttgaccgcgacaacttcgacatccactggattgactcggatgtggtgttcctcgccgggaccggcggcgggatctacgacgtgaaatggaacgacagcctgcgcagcaacttctcgttatacggccgcaactttggcgatatcgccgacagcagcaacagcgtgcagaactatatcgtcagcatgaataactttgccggcccggtgcagatgatggtcagcgggatgcgggcgaaagataatgacgaccgccaggacgcgaacggcaatctggtgaaaggcgatgccgctaacaccggggttcatgccctgctgggcctgcacaatgagagcttctatggcctgcgcgacgggaccagcaaaacggccctgctgtacggccacgggctgggcgccgaggttaaaggcatcggctccgacggcgcgctgcgcccgggggccaatacctggcgcttcgccagctatggcactacgccgctgagcgatcgctggtttattgccccggccgtgctggcgcagagcagtaaagatcgttatgtcgatggcgacagctatcagtgggccaccctcaacctgcgtctgattcaggaagtgacgcagaacttcgccctcgcctgggagggcagctatcagtacatggatctgcagcctgaaggctacaacgatcgccatgcggtcaatggcagcttctacaagctgaccttcgccccgaccttcaaggtgggcagcatcggcgacttcttctcgcggccggagatccgcttctatacatcgtggatggactggagcaaaaaactggacaactacgccaacgatgacgcgttaggcagcaacggattcaaatcgggcggcgaatggtcgttcggtatgcaaatggagacctggttctgacggccaccggggcgacagggtaaataacacataaatataaggttcgcggcgcctgccacggctggcgccgcccacgccatatcatcatgcatttagagggtactatggattttgaacagatttcccgctcactgcttcccctgctgggcggcaaggaaaatatcgccagcgccgcgcactgcgccacccgcctgcggctggtgctggtcgacgacgcgctcgccgatcagcaggcgattggcaaaatcgacggggtgaaaggctgctttcgcaatgccggacagatgcagatcatcttcggcaccggggtggtcaataaagtctatgccgcctttatccaggccgcaggcatcagcgaatcgagcaaatccgaagccgccgacctggcggcgaaaaagctgaacccgttccagcgcatcgcccgcctgctgtccaacatcttcgtgccgattattccggccatcgtcgcctccggcctgctgatgggcctgctggggatggtgaaaacctacggttgggtcgacccgagcaacgctctctatatcatgctggatatgtgcagttcggcggcgtttatcattctgccgatcctgatcggctttaccgccgcacgcgaatttggcggtaacccctatctgggcgcgaccctcggcgggatcctcacccatccggcgctgaccaacgcctggggcgtcgccgccggcttccacaccatgaatttcttcggcatcgaagtggcgatgatcggctaccagggcaccgtcttcccggtgctgctggcggtgtggtttatgagcatggtcgagaagcggctgcgccgcgtgatccctgacgcgctggacctgatcctcactccgttcctgacggtgattatctccggctttatcgccctgctgctgatcggcccggccggtcgcgcgctcggcgacggcatttcgtttatcctcagcacgcttatcagccacgccggctggctggcgggcctgctgttcggcggcctctattcggtgatcgttattaccggtatccatcacagcttccatgccatcgaggccggactgctgggcaacccatcgattggcgtcaacttcctgctgccgatctgggcgatggccaacgtcgcccagggcggcgcctgctttgcggtgtggtttaaaaccaaagatgccaaaataaaagccatcaccctgccgtcggcgttttcggcgatgctggggatcaccgaggcggcaatcttcgggattaacctgcgctttgtgaaaccgttcatcgccgcgctggtgggcggtgccgccggcggcgcctgggtggtgtctatgcacgtctacatgaccgcggtgggcctgacggcgatcccgggaatggctatcgtgcaggccagctcgctgctgaactacattatcggaatggcgatcgccttcgccgtggccttcgcgctctctctgacgctgaaatacaaaacggacgctgaataatgtcattaccgtcacgcctgcctgcgatcctgcaggccgttatgcagggccagccgcaggcgctggccgacagccattatccgcaatggcatctggcgccggtcaacggactgctgaatgatcctaacggcttttgccaggtcgccgggcgttaccacctgttttatcagtggaacccgctcgcctgtgaccatacctataagtgctggggacactggagctctgccgatctgctgcactggcggcacgaacctatcgccctgatgccggatgaagagtatgaccgcaacggctgctactctggcagcgcggtcgagttcgagggcgccctgactctgtgctacaccggcaacgtgaaattccccgacggcgggcgcaccgcctggcaatgtctggcgaccgagaatgctgatggcaccttccgcaagctggggccggtgctgccgctgccagaaggctataccggccatgtgcgcgaccctaaagtgtggcggcaggacgggcgctggtacatggttcttggggcgcaggatgtgcaacagcgcggcaaagtgctgctgtttaccgccagcgacctgcgggagtggcgcctggtgggcgagatcgccgggcacgacgtgaacggcctggcgaacgccggctacatgtgggagtgcccggatctctttccgctggcggacacccacctgctgatctgctgcccgcaggggctggcccgcgaagcgcagcgctttctcaatacctatccggcggtgtggatggcaggccgcttcgacgccgaacgcgggatcttcgaccacggcccgctgcacgagctggacagcggatttgagttctacgcgccgcagaccatgcaggccgacgatggccgccgcctgctggtcggctggatgggcgtccccgacggggacgagatgcatcagcccacccgcgcgcagggctggatccatcagatgacctgcgtgcgtgagctggagtggcaggctggcactctgtatcagcgtccgctgcgcgagctggtcgccctgcgcggggaagcccagggctggtgcggacagaccctgcccctcgccccgatggagctggcctttgacctttcccccgacagcacgctggggctggactttgccggcgccctgcagctcaccgtcaatcgcgacggcctgcgtctgtcgcgtcgcggcctgcagacggcggagatgcatcaccgctactggcgcggcgaggcgcgacgcctgcggatctttatcgaccgctccagcgtggagattttcatcaacgatggcgagggggtgatgagcagccgcttcttcccgggctatccggggcagctcatcttcagcggtgcgacgccggtggcattctgccgctggctgctgcggccatgcatggtagaataagcgttttgctttcaggctcccgggtgctgatgaaaaccaaacgcgtaactatcaaagatatcgccgaactggcgggcgtctccaaagcgaccgccagcctggtactcaacggtcgtggtaaagagctgcgcgtggcgcaggagacgcgcgagcgcgtactggcgatcgctcgcgaacagcactatcagccgagcattcacgcgcgctcgctgcgcgataaccgcagccataccattggtctggtggtgccggagatcaccaactacgggtttgccgttttctcccacgagcttgagacgctctgccgggaagccggcgtgcagctgcttatctcctgcaccgacgaaaacccaggccaggagagcgtggtggtcaataacatgatcgcccgccaggtcgacggcctgatagtcgcctcttgtatgcacagcgatgccgactatcagaaactcagcgaacagctgccggtggtgctgtttgaccgctcccccagcgacagcgccctgccgctggtgatgaccgactcggtcaccccaacggccgagctaatctcccgtatcgcgcctcagcatgcggacgagttctggtttctcggcggccagccgcggctgtcgccgtcgcgcgaccggctggcggggttcacccagggcctggcccaggcggggatcacgctgcgccctgagtgggtgatcaacggcaactaccaccccagctccggctatgagatgttcgcggcgctctgcgctcggctggggcgtccgccgaaggcgctcttcaccgcggcctgcgggctgctcgaaggggtgctgcgctatatgagccagcatcatctgctggattccaatattcatctcgccagcttcgacgatcactatctgtatgattcgctttccctgcgcattgataccgtgcagcaggataatcgccagctggcctggcactgctacgatctgctcagccagctgatcgacggtcaggccccggagccgcttcagcgctacctgcccgccaccctgcagattcgccatccctgacggcgcggttggcaattagcgttttcgcctggcgcgcgccgcctgcctcagcgccagcagcgcgctggcgagcaccgcgccaaggccgatcgttaccggccagcggtaagccaccagcaacgagggcaatccaccatccggcgccagcatcaccagattccagcccgccagccccgcgttgccgttcagcgcccggcttaacatccgctgatgcggggcgaatggctgaatggtctggtagtggctgccgaacagcgggggctgcatctctcgcgggaactgcgcctgtacctgggccagcacgctggccggcagcgcgtgcgatgccgccagcagatgcccgtcgccattcaccagcagcagctgataatgccgctcctgggcgagggtctggagagcggcgcgcatcgccgccagcggccaggtcgcttcccgctgcggcgccggaatgttcatccgccgctcaaggcgttccgccacccactgcgcatcctcctccagctggcggatctgcctctcacggtaaacctctctggccggcaaattcatgccccgaccgagcgccaggatcgccagccccgcgagcagcgtgacgataaggcccctttttcccgctagccagcgcggcgagaatttgccaaaggatggtgtattcatacgactccagaaaccgcaggccacgcgtggcccctgacgaatggacaacggaagtggcgaaactgtacaggatgcgcagcgcgggcaaaacagacaggcggagcctggcggggagtattttgtttatttctggacaggacgggcggcaacggcatccttcgccgttgccgcccgttgataagattagtgttttttccggttgcgacgcatatcgatggttaccgccgcaacgataatgatgcctttaataatatcctgcacataggcatcgacgccgacaaaggtaaaaccgcttttgatcaggccaaggatcatcgcgccaatcagggtgccggtaatgcgccccactccgcccattaagctgctgccgccgatcaccgcggcggcaatcgcgtccagctcgtaggacatccccatgctcgactggccgctactgacgcgcgccgccagcaccacccccgccagcccggagagcgccccggcgatggtgtagacgatcaccagatatttattcacattgatgccggacactttggccgaggtcatgttgccgccgatggcatacacatatttgccataccgggtatgcttcagcgcaatgtgaaacacggcggcgatcacgaagaagataatcaccggcatcgccccctggcctatcgccgtaaagctgtcggagaggaagctgatcgggttgccctgagtgtaatactgcgccagaccgcgcgccgaaaccatcatcccgagggtggcgataaacggcgggataccggtccgcgtcaccaggaaaccattggtcaggccgcacagcaggccgacgccgatccccgcgcaaatggggatcaccgccggcaggttgaccagcgccgggaacattggcgacaggctatcggaggtttgcgccaggctggccgccaccaccgccgcaagggcaataaccgagccggaggagaggtcaatcccggtggtgatgatcacctgggtgacgcccacggcgatgatgccgataatcgccacctgcagcacaatcagcaccagccggttggtattgagcaggaacgactggtcgcgaacataccagccggcgatttcaaaggtcagggcaatcaccagcatcaccacaaagatgccggtatctttcggcattttatgccgcaaattagcgaagaaggaggaaccctcgctggccggagccgccgttaatttcatattactcattctctgtgcctcaatgggatgccaacgacaaaatggtttcctggtcggcttcgtctttttccaggatgccggtgatacgaccttcatgcatcaccatgacccgatcgctcatgccgaggatttccggcagttcagaggagaccataatcaccgccaccccccgattcgccagttcactgatcagatgataaatctccgccttcgccccgacgtcgataccgcgggtcggctcatcgagaattaagattttcggttgcgctaacagccagcgcgcaatcaggactttttgctgattccccccgctgaggttattaataatttgatccatcgtcggcgttttaatattgagccggcgtatttgctccatgcagtcttcggccattttcacgtgctggacaaaaccgctcttgccgatatattccggcattttgacgatactcatattttccagcaccgacagcaccagaaacaggcccgactttttccggtcttcggttaataatgccatccccttttcaatcgccacggagggggaatcgatggtcaccggcgccccgtcgatcagcacttcgccgctgtcgaagcgctccataccgaacaggctttccatcacctcgctgcgcccggcgcccaccagcccggccacgcccaggatttcgccacggcgtacgctaaagctgacgtcatggaacacgccctgacgcgtcaggttgcgcaccgtcagcacctcttcgccgatggtgttattaaatttcggaaacagctgggttaattcgcggcccaccatctgggtgatcagcgactgccgggtaaattcggtggtgtttttgctccctacccaggtgccgtcgcgaaagacgctgatctcatcggtgatggcaaagatctcatccattttgtggctgatatagatgatcgctttaccctgggcgcgcaggtcgcggatgatggtgaacaggtgagccacctcgccttcggtcagcgccgaggtgggctcatccatgatcacgatatccgcgttccatgaaaccgctttggcaatctccaccatctgctgggcggcgatgctcaggtcgcccaccagccggtcagcggttaagcggatattgagcttatccagcagcgcctgggtctggcgggtcagctggccgtggtcgacaaagccgtatttcatcggctcgcgccccagccagatattctccgccaccgtcatatgcggcaccagattgagctcctggtggatcatcgagatccccgagcgcagcgcatccatggtgtcggtaaactccaccggctcccctttgacgcgaatcgaccctttatcggggcgatagataccgatcaggcatttcatcagcgtggatttaccggcgccgttctcgcccatcagggcatgcaccgttcccggacgcacgcgcaatgagacattatcgagcgccttcacgccggggaagaacttactgataccttcggcttcaagggcaaaagcgttcatacatccacctccgtatcacaggttggccaggactatttctgattacggttggtaaattcagccatgttctctttggtgatcagctgatacggcacatcgatgattttttccactttctcgccgttcgccagcttgatggccgcgtcgactgcgccttcaccctggcctttcgcatcctggaagatggtggcgatcatcttgccgctcttcagcatctgcagcgcgtccggggtgccatccacgccggcgatgagaatatggttcgggtttttgcccagcgcctgcagggcgccgatcgccatttcatcgttgttggaggcgatggcctggatatcctcaccgctggtcatccagttgctgaccacatccactgcgtcattgcgggtaaatttcgcggtctgcttctggacgattttgatgttcgggtatttcgctaccacctcttccacccctttggtgcggtcgcgagtggattcattcgccaggtcgccgagcaggatcgccacattgcccttaccgttcatcgctttcgccagcgcttccatctgcagacggccggcgagaatagagtcagatcccacataggccatcttgtcggtcagctccgcctgcggacggcggttcacaaacaccagcgggatcccggctttggtggcctgatccatgatcggtttcaccgcgttggtatccaccgggttgacgataatggcgtccaccccctggccgataaagttctgcacctgctgcagctgctgggagacatcccctttcgcgtcttcgatctgcgatttaacgccatcttttttcatctctttttgcatcgaggtacgcaggatcgtcaggaagttatcgtcaaacagcgccatcgagacgccaatggagacatcttttgccataaccaccgcaggcagcatgcaggctaacaaagaggcaacaatcgttttcttaatattcatagttgatccttgattttgtaggtacgccggtgaatgaaacaaaatgaaaaattaatttcagttacgttgcggcaaatgtctgctggtatatcgacgacgctgcggcacctctcgcactccatcgtgatctaaatcacaaataacggctgttttatcatcactattttgaaacatcagtccatttacgccgcaacctggatttcagaccatttatttcattaacaagacatttgaaacttttataagtaaataactgaaatgaaaattttaaaactatgcagtaacagaattttgacagacatctaacattgccgcataaatgagcgaaaaatgagaagcagacaacgctttgaagcgatccctcccggcggggtggtcatttacccgccggggaaatccgtgttgtcaggaagggaggcgccgcacgccttagtccacgttctcggcgctgtagaggataaagtcgactttaccgtcggcataggtttgcggctggtagccggactccagatggcgcagcatcaggtcgatcgccagctgggcgtgctggcgggtgttctgatcgagcgttaacgccaggctgcccttcgccagctgctgccgggtggtgttgtaacgctcatgggtgatccagcagacgtcgccttcgcggcggtggcgggccagcgcctcggcaatctgggtattgccaagcccggtgttatagatcccaacaatatttcggctgcggcacagggcttgctccaccaggcgggtgatctgctcccgccgctcctcgcccgccagcacgtcgctgagctgcaggtggggaaagcgctggctcagcacctcgcggaacccctgaatgcgcaggcgatgcgcgctgtaatcttgccggccgctgaccatcagcacctcgccgggccgcggcgtcattctccccagcattaaccccgccgtgcggccagcctgtagctgattgatccccacgtggcagagtcggtcggcgccgggcaggtccgtcgccagggtgatcgccgggacgccagcctcccggcagcggcgcagcgcgtcgtgcaccgcgggatggtcattgccgaagacgatgatcccctgacgctgctggcaactgcgcgcaatgcgccgggccagtgtcgtcggctgcgactccgggacaaaggtacggtgcaaggtcagacggcgatagccgaggctatccgccacggcggcaaaatcctgcgccagctgcggaaagaagaacgagtcattgctgctgagaaagacctcaatctgccagggaaagcggtgctcctccggcaggatccgcttcagtcccgcctcgcgcgccgcctgcagcactttgcgcgtggtctgcggcgatacgccgccgcgctcgttcagcacccggtcaacggtggccacgccgacgccaatctgtctggccagcatcgccagtgaaatgtttttcatcgcccctctcttcatgatggaaatccatcaaaacggcagtgtcagtgagtttagcaaaccgattatggtggcagcgtcccctcgccattctggagaaaaaaatgatctgcaaacgttttgccctggtaggcagtggttttatcggtcaggttcatgccgccagtcttgcccgtcatgaaggaagtgcgctgacgatggtggccgatgccgccccggagcgcgcccaggcgctggccgcccgctatggcgcccgggcggtgaccgtgagcgaggcgatccatagcgacgccatcgacgcggtgctgatcgccagttcaaccccgtcgcatgccgaactgctggaagccgccgccagggcgggcaaggcggtctattgcgaaaaaccgatcgacctctccctggcgcgcgcccgtgaggtggtggagcgggtgctccccctgaacgtgccggtcactgtcggctttaaccggcgcttcgatagcagccatcagcagctccgccgccagctggagcaagggctgatcggccgggtcgagctggtgcagatggtctgccgcgcctccagcatgccgccgctcgactatctgcgcagctccggcggccagatgcgcgatcaggcgatccacttcttcgatctcctgcgctttctcactggcgatgaagtgcgcaccgtagcagcgatgggcgcggcgctggccctgccggacattgccgaatttggcgatgtcgacacctccatcctgatgatgcagatgcgcggcggcgcgctggcgcagctggacaatacccgccgcaccggccacgggtacgatgaacggatcaccctgctgggcgccgagggcgcgctggagtccggtagccagtcgccggcgggccctaccctgtggcgcggcaatcagcgcattgagccgggcctgtggccagactggttcagccgggtacagggatcttattaccagcatcttgacgcctttattcgctccctgaatggtgaaaccgtcgccgacctgcccggcctgctggacggcctgcaggcgcaggccattgccgaagcggcggttcagtccctgcagcatggccagtttgtcgccgtcgacgactgtcgctgagcgggtgcgaggcaaccgctatcaggcgctgcacctgcctttatgccgggcggcggcgtcgccttgcccggcctacagaagacaggcattaatacaccgtaatatcaataggttgcatagatatcccaggcccgtgcaagcgcagcgccgccgggcaaggacagcgggcgcagagccgcttttatgccgggcggcggcgtcgccttgcccggcctacataacacaggcattaatatgctttaatatcaaacccttgcatagatatcccaggcccgcgcaagcgcagcgccgccgggcaagaacagcgggcgcggagccgcttttatgccgggcggcggcaacgccttgcccggcctacataacacaggca

SEQ ID NO: 5332 - DNA, 95547 bp, Unknown
  gut microbiota DNA sequence
gaaaaggtcccgcgggcgatagtcaggaagtggctggtcgggtagatttgcccaatccagcgcccgggaccttccagcgaggccaccggatcgatcattccggaaaactgggttgccgggatcagcgtaataatcgcggtaccgaaaatagcggcgatttggctcttcataaaggttgagatcagcagccccagaccagtggcgatggtgacatacagcagcgccgccagggtcagcgtcaggaaactccccttatgcgcgacgccaaagacaaagaccgacagcgcgcacagcaggaagaagttaaacatccccagtacgatgtaaggcagctgcttgccgagcaggaattcgctgcgggtggttggcgtcacgtacaagttgataatcgatccgagctctttctcacgcactacgctcagggcgctgagcatcgccgggatcatcatcagcagcagcgggatcaccgccgggacgatggccggcaggctcttcacatctggattgtagcgatagcgggtctcgatggagatgagcgaggtatcgcgctgcgggctgctctgccggccggccatctcctgcagccaggccagatgcatcgcctgtacgtagccgcgcacggtttccgcgcggttgggcatcgcgccgtccacccacacgccgatttgcaccggcgtgccgcgggcgatatcgcgaccaaagttcggcgggatctctattgccaccgccagctcgccgtcgcgcatccggcggtccagttcgtcatagctgtgcagcggcgcctgctcgataaagtagcgtgaaccggctatgttctgcgaccagccctggctgctgagggtttgatcgcggtcgaggacggcaaagcgcagatcctcaacgtccatgctgatcccataccccatgataaacatcaggatcaccgtccccagcagcgccagcgtcgatcgtaccggatcgcggcgcagctccagcgcctcgcggcggctatagctaaacagccggcgaagactgaaggcctgccgtggagccgtatgtccggaatgcgatgccacagcagacgtgggttcttctggtactggagaggacggctgggcctctttaagccaggcgataaacgcctcttccaggctgtttgaaccgcgctgctcgaccagcgcctgcggcgtatcgctggccagcactttgccggcgtgcatcagggagatacgatcgcagcgttccgcctcattcataaagtgggtggagataaaaatggtcacctgatcctgccgcgcgaggtctaccatcagctgccagaacatatcccgcgccaccgggtcgacgccggaggtcggctcgtcgaggatcagcatctccgggcgatggatgaccgccaccgctaacgacaggcgctgacggatccccagcggcagatcggcgggaagcgcgtcttcaacctcggtcagcataaagcgctcgcacatttccgccacccggccggggatttcgccgtccggaatatggaacaggcgggcgtgcagctcgaggttttgccggacggtcagttcgctatagagcgagaaggcctgcgacatataacccacccgctggcgggtggcgatatccttcgggtcgaccggctggccgaacagccaggcttcaccttcgctggcgggcagcaggccggtgagcatcttcatggtggtggatttgccgcagccgttggagccgaggaagccgaagatttcaccgcgggcgatgcggaaattaacgtggtcgacggcaacaaagttgccaaagcgcatggtcaggccgcgcgcttcgatggcgatctcttcctcacggctgccgcgcggtgggataactaccgccctatgcgcctgacgctgtgcttctggcagcagggcgataaacgcctgctccaggatctggctgccggtctgggctttgagctctgcggcgctgccggtcgccagcacctcgccggcgttcatcgccaccagccagtcaaatcgctcggcctcttccatgtaggcggtggccaccagcacgctcatcgccggctggcgctggcgaatactgtcgataagctcccagaactgcgcccgggagaggggatcgacgccggtggtcggttcatcaaggatcagcagctgcggatcgtggatcagcgcgcagcacaggccgagcttttgcttcatcccaccggagagttttccggcggggcgatcgcgaaacggcgccagcccggtactctgcagcagctcgttgatgcgcagttcgcgctcggctttatcgtggccgaacaggcgggcgaagaagtctacattttcatacaccgagagagtgtgatagaggtttttccccagcccctgcggcatccacgcgattttcggacacacctcgcggcggtgatgcacatcgcgcatatcgccgccaagcaccatcacgttcccctgctcgatggtccgcgccccggcgatcagcgaaagcaggctcgatttgccgacgccgtccgggccaatcaggccaaccatacgccgtgccgggatcgccagactgatatcgcgcagcgcgatggtggcgccaaactgctgaccaacgtgttccagcagggcgacggggggcgaggtatcctgcggcgttagtttcattgcggcaacctcaccgccagggcttcaggccagggttgttgtttatccagccgtacgtaagccataccgggcaggccggttttgacatactccaggtgctgcgccagcagctccggcgggatacgcgctttgacgcggaacattagcttaaggcgctcgtcgctggtctcgaccgttttcggcgtgaactgggcgacgctggcgacaaagctgatattggccgggatcaccagatccggcgcggcatcaaggaccaagcgcgcttcgctgccgagcgccagcagacctgcctgttcggtgggcagaaagaaggtcatatagacatcggcgagatcgaccatgttcagtacccggccaccggcggccaggacttcgcctggctcagcgacgcgatactgaatgcggccgtcgcgaggggctttcagctcgctatcgtcaatatcggcgaggatccgccgctcggtcgcctgggcggcttcgacgcgggtttgcgcctgaataatgctggtgcgggcagcttcgatggcggcgcgggcggcggagacctgggctttcgccgattccagcgccgcgcgggcgctctctgcggccgcgcgatcgtcatccagctgctgggcggagacggcgccacgctgggagagggcgttggagcgaacatggcgtttcgccgtggaatccagctccgcctggcgctgcttcactaccgcttcgctggcgcgcatttcactttgtcgctgatcgagcaaggctctggcggccaggaccgcgctttccgcttccttgatttgcgcggcggcttcaagacgctgctcgttcagtacccgggtatccattctcgccagcacctctccctggtgcacgaactgaccctctttgaccagaatggtgtcgatacgcccggcgattttactggcaatatcgacttcggtggcttcgattcggccgttgctgctggcaaaccccgccgggagtcccggcgggcgcagcagccaccatgcggcggcggcgagcaccaccagtaagccgacaaaataccctgcccaacgtttctttattttgtccatacgcgactcgcttgattccctgtgctgagtggtgcgcgtgtttcctccggcgggcggagcgtccttcttgcgaaggacgaaaaagtggagggagggccgctgacgccgcgctctgccgcgccgatgcgcagccgctcgctgggctacttatgtggtcatcatcagcgatcctggccttaatgaaacacgcatagtgagagctaccgttaacgcgatagtaacagccggggcgatattgtccatacgaaagacagggtcttgtcggcgtgttaacaaaattatccgcacagggagtatttcaccatctcagaacagcaccggcagacccagcccacgcttcacctcatgcagcgtctgctgtgtgaggtggtgggcgcgttcgctgccctggcgcagcagctccagcagcatccctttatcctgaataaaagtggccctgcgttcgcggatcggcgccagtagcgtctgcaagcaggtctccagctcattcttacactggcgatcgcccagcccgccgcgctgatagtgggctttcatctctgccacccgcgccttatcgctgtggaatgcatcgagataggtaaacaccacgttgccctcgacatgccccggatcgctgactctcaggtgcgtcgggtcggtatacatcgcgctgaccgcgtggtggatctcctcctctgtggccgataacgtcagcgtattgcccagcgatttcgacattttggcgttgccatcgacgcccggcaggcgactcacttcgctgagtagcgccttgcagtggcgcagcaccggctcgccggtgaggctattcatcttgtggacgatctcgttggtctgctcaatcatcggtagctgatcgtcgcccaccggcaccagttcggccttgaacgcggtgatatcggccgcctggctaatcggataggcgagaaaacccaccggcagcgagcgggcgaatcctttctggacaatctcatttttgaccgtcggattacgttctacgcgggcgacggtgacgatattcatatacagcgcgctgagctccgccagcgccggcagggcggactgcaggcaaatagtggtgagcctggggtcgatgccgacggccagataatcggccatgacttcgaggatatggtggctgattttttgcggattgctgccgttgtccgtgagcccttgcaggtcggcgatcaggataaattgctggtggttatgctgcagcgcgacgcgctggcgcagcgagccgacgtagtggccaagatgaagttggccggtcgggcggtcgccggtgaggatggtttgtggatggttcatcagggactccttatcagactgttcagccgaaagacgtcctgaaaacaccaaagccgccttccggcggctttgaaaatggaaacgtgtatcgtgccgcctgttatgcaggcagccaccaacggcgggggtaggtaacgataacgtttctgttcatagggagtatcctgccacggaaggggcgggaggcgcaatcaaaaatcacatacttttcctgatgttatttatgtgattgtttttcggtaaataacgaagcgggaaaaatatattttctctgcgacccgatcattattctggaacaacaaactatgttgcattttttttgtgaaaaagctcacgccacaggattatagtattattatccatatttatagctgaatattacctgtctgctgttacagcttgtgtttattctcttctaaattattaacattattgcaatttctatctattttcccgctttgcgtcatacccctgtctgactacaacgtattgaggctaattattatgcataaacgtctggtcgttaatattttttcatccttgctgttgggggctgcgcttatttccgcgccggtatatgcggcggaaaaaaccgtagtcaatatttcaaaagtggacggcatgccatggtttaaccggatgggtgaaggggtagtccaggccgggaaagagtttaacctcaacgcctcccaggtagggccgtccagcaccgatgcgccgcagcaggtgaaaattattgaggacctgattgcacgtaaagtggatgccatcactatcgtgcctaacgatgccaacgtgctggagccggtattcaaaaaagcccgtgacgccggcatcgtggtactgaccaacgaatcgcccgggcagccgagcgccaactgggatgtggagatcatcgataacgagaagttcgctgctgaatacgtggagcatatggccaagcggatgggtggcaaaggcggctacgttatctatgtcggtagccttacggtaccgcagcacaacctgtgggccgatctgctggtgaaatatcaaaaagaacattacccggacatgcatgaagtcacccgccgaatgccggtggcggaaagtgttgatgattcccgccgtaccacgctcgatctgatgaaaacttacccggatctgaaagcggtggtctcttttggttcgaatggcccgattggcgcggggcgcgcggtgaaagagaagcgtgcgaaaaataaagtcgcggtctacgggatgatgatcccctcgcaggcggcttctcttattaagagcggcgatattaccgaagggatcacctacgatccggcgacagccggctatgccctcgcggccgtcgccagcaccctgctgaacggcaaaaccattgagccgggatttgaactgaaagagctcggtaaagcggaggtcgatagcgacaagcatattatccgcttccataaagtgctgctggtaaataaagacaatattgattcgctctactaatccaccttccggggcgccagccgccccggcttaaccagccaggggatgctatggaacctttcctttcccttcgacacgtcagcaaaaccttccacgccaaccgcgcgctcaatgatatcagcatcgactttatgcccggagaagtgcactgcctggccgggcagaacggttgcgggaagtcgacgttgatcaaaattatctctggcgtctatcgcccggatgagggcgcagcgatgacgctgggcggcaagacgtggcccaaactgacgccagcggcctctgtcgcccatgggatccaggtgatttatcaggatctgtcgctgtttcccaatctcagcgtgtgggagaacattgctataaaccactatcatcgcggcgtgctggtgaggcgcagcgaactgcgacgcagtgcggagcaggcgatgcgcagtattaacgtctcgctgccgctggatgccgccgtggaatcgctctccatcgctcgctgtcagctggtggctatctgccgcgcgctggcgcaggatgcccggcttatcattatggatgaacccacggcctcattgacccatcaggaagtggagggactattgcatgtggtgcgccagctgcgtgagagggggatctgcatcgtcttcgtaagccaccgtctggaagaggtcatggccgtatcggaccgcatcagcgtgctgaaggatggcaatctggtcggcaccttgccggcggcagaggtaaccacccgccggctcggttttctgatgacgggccaggagtttgactatcaggtgcgcgatctgtggcaggggcagggcagtacgccggtgctggaggtgcgcaatctcagccgcaaaggggaatatcataacgtctccctgaaggtcgaagccggagaagtggtgtcgatagtcggcctgttgggcgccgggcgaacagagctgtgcctgagccttttcggcatgacccgccctgacagcggcgagatcctgataaatggccagccggtgcggttgcgtagcaatcaggacgctatccgccacggtatcggctatgtctccgaggaccgtatgtcgcgcggcctggtgatgagtcagtcgattgaaaacaacattatcagcaccgtgtttcataaagtgaaaggcgcttgcggactattgagtgatagtaaagctcagcagctggtcgcaagaatggtcaacgcgttgaccattaaggcgccggatacgcatctgccggtgaataccctctccggtggtaatgcccagcgcgtttctatcgccaaatggctggcgatctctcctaagctgctgatcctcgatagcccaaccgtgggggtggatatcgcaaacaaagccgggatctatcatatcatcagcgatttggctgcccatggtatcgccgtgctgatgatttgcgacgagattgaagaggcgtggtaccagagtcatcgcatcctggtgatgaagcagggcgagttgacccatagcttcctgccggacagcagtacccagcagcagatagcggaggtggtcaatggctaatctgttgaaacgacatgaattctggttaggcatgttcattattgcgctgtgcctgctgctgggctggcgcagtgaggaatttttcactttcggcaatctttacgacctcgctaataactatgcgatgctgaccattctcgcctgtggtctgttcgtggtgctgatcgccggcgggattgatatctccttcccggctatgaccattatcgcccagtacggcatggtggtgatgctgcaaaaagtaggcggcaacttcgcggtggcttttgtgcttgccggcggcatcggcgtgctgctggggctggtgaatgcgctgttggttaatcgtctgcgggtcccctcgatcattatcaccatttctacgctcaacattttctacggtttgctgctgtggttaagcaaaggtgtctggctctacgacttccctccgtggtttgaaaagggggttatgctgttcaaatataccgatgccgatggttacgattacggtctggggctgccgctgctgacgatgatcgccgtggtgctgttgaccgcgtttatcatgaatttcaccaccgttggccgcaagatctatgccatgggcggcaaccgggaatccgccagccgcgtcggcttcagcgtgctccgcctgcagctgttcgtttatggctatatggggctaatgtcgggggccgcaggtgtcgtgcaggcgtggacagtgatgaccgttgcgccggattcactgctgggctatgagctgacggtgctggcggcggtggtgctgggcggcaccagcctgattggcgggcgcggaactctcaccggtacgctgctgggggtgattttactggcggtgatgcagaacggcctgaacctgctaggggtctcctcctactggcagaccctgatcactggggcgatcatcgtcgtcagcatcagcgtaactgcatggagccagcatcagaaccggagcttgttatgaaaaaatcgtggcgcaacaacgttgagttttacctgatcggcctgctgctgctgatggttatcgcctttagcatcgccatgccaaacatcttctggtctgtcagcaatttccagtcgattgcctcgcaaatgccggtgctggggatcctggcgctggcgatggccatgactatgctttgcggcggcattaatttgtcaattatcgcgacggctaacgcctgctcgctggtgatggcctgggtggcgacgagctatccgcctgggggcgctaccgcgctggcgacgctgctggccggcggaggggcggcgatgatcattggcctgtgcaacgggatattgatcgccgggatccgcgtttcgccgatcctggctacccttggcatgatgaccctgctcaaagggataaatattctgatcaccggcggcagcgccatcgctaactatccgcagtgggtgctgtggctgaatcacgcccagtggttcggtattccgctgccaatgtggctttttgcggtggtggcggccgggctgtgggtgctgctggagaaaagcccgctgggtcgggcgatcatgttgatcggatccaacgaacgggcgacccattattccgggatcaatacccggcgggtgttgatgtgggtatatgtcatctcggccctgctctgcgcggtggctgcgtttctgatgatgtcgaagctgaactcagccaaagcatcttatggggaatcgtatttgctggtgtcgatcctcgcggcggtgcttggcggcgtgaatccggatggcggtagcgggcgcatcgttgggatggtgctcgcgctgttcctgctgcagattattgagagtgggttcaatatcctcggtatcagcccctatttgacgatggcgctgtggggcgtattgctgctgtgctttatccaggcgcgaggcatgctgggactggagagagccgggtaaatgacccgtcctcgggggcgaagacgggatagccagttattcgctacgcaaatgcaccgccaggccgctttgccctggcgccagctccgggcgcagcgtcagcgacgggatcagataatcgccatgattctggcggcggaatggaatgggctcggtttgccacagcgtgtccagccgctcggccagggcggcgcactgatcggcgaactgcccggcatcggttttatccgtgcggtagaacactagcgggggaagcacctcaaagccgggatagaacagcataccgtgctgaatggggaacaggatgtcgtcgatggggccattgatcccgcgtggtgaatagtgttccgcccagccgccggcggtgacgatcagcatcgcccgcttgccgacgaaagtgccttccccgtagcgatcgccccagtggcggtcgctgtgctcgccgacgccataggcaaagccccaggcgtacaccctgtcgatccagcccttcatgatggcgggcatcgagaaccaccatagcgggaactggaaaatcaccgtatcggcccacagcagcttttcctgctcggctacgatatccgcactttgggtgccctgggcaaaggcctgtttggaatcgagggtcggccgccagaactcgccgaccggcggggcgccgctatcgtcggcgtcatatccggccttccagcgcatagcgtagagatcggaaacctgcacttcatgcccggcctgctgcagatggcggatggcgaaatttttcagcgcgccattgagcgagcgcggttccggatgggcgtaaatcagcagtactttcataatatcacctctggcgtatggagagctgcagagtaggaaagctgacgctatagtagaaattaattacttaaattcccggtatagtcgtgattaatttacagcgtctggatctcaatctgttgcgcaccctggatgtgctgcttagcgaaaacaacgttacccgggcggcgcagcggctgaatctgtcgcagccctcggtaagtattcagctcgccaggctgcgggagattttcgccgatccgctgctgatgccgggcccgcgcggcatgcagcccaccgcccgcgccgatgagcttcgccagccgctgcgcgccgcattagccgcgctggagcaggcggtggcgccggtcagcccttttgatccggccacggcggcggagacctggcgggtggcggcgacggactatatggcctcggcgatcctcctgccgatgctggctgggttacgccaggcctctcccggcagtcggttggcggtattcgaactgcagccggcgcggctggagcagcaggcggccagcgatacagtagatatcttctttcatacccgcgagggcgcgccgccggggctgcatcagcgcctgctgtttcgcgaacgctacgtgctggctggccgggtggaacatccggcgctgcggcctgggcttagcctggaaacgttctgtcagctggagcacgtgatcgtctccccggacgggggcggcttcagcgcggcgaccgatatcgcgctggcgaacctcggactgacgcggcgggttgtcctttccgtgccacatttcctgtttatgctggagaccctgcgcaatagcgatctggtggcggtcctgccggagcggctggtgcgcgggcagagcgggctggtggtcgtcgagccgccgctggcggtcgccggctttgagatgctgatgctgtggcacgagcgctggcaccgcgacccggcgcatcaatggctgcgccagttcattgtgaattcactggaggaacagacatgctgagtggactgaatcacctgaccctggcagtcagccagctggcgccgagcgtggcgttttatcagcagctgctgggcatgacgctgcatgcccgctgggacagcggggcttatctctcctgcggcgatttgtggctgtgcctgtcgctggatccgcagcggcgcgttactccgccggaagagagcgactacacccattatgcgtttagtattagcgaagccgattttgctagcttcgccgcccgccttgaggctgccggcgtggcggtctggaagctgaaccgtagcgaaggtgcctcgcactatttcctcgatcccgatggccataagctggagctgcacgtcggcagtctcgcccagcgtctggccgcctgccgcgaacagccgtataaggggatggtgttttttgatcagtgaagctgcttcgcagacgctagatcacccgtagccccggtaagcgcagcgccaccggggagaacaggttaaattcactccatcgccaccttcaccgcttctcccagcttcaccatcaccgctttatgtttctcggtcggcggcagggcgcagttgatcctgacgcagttgcgatacttgcccgctgccgaaaacagcgagcccggcgcgacctggatcttcagccggcacagctgcttggcgacgcagaccatatctacctgctccgggagctcaacccacagcataaaaccgcccttcggccgggtgacgcagatcccgcaggggaaaaattcccgcagccagcaggtgtagatctcgatattgcgctgatagatctgccgcatccgccgcacgtggcggtggtagtggccttcgcgaataaaattgcaggccgccagctgagtggaggggacgttggtcccgctggcggcgtacttcatctgtagcagcttgtcgtagtagcgcccgggggcgatccagccgatacgcagcccgggggcgatggttttggtaaaggagctgcagagcatcacccggccgtcgatatcccaggagtggatcgtgcgcgggcgcgggtattcggtggccagctcgccgtaaatatcatcctcgaaaataacgatatcgtagcgttgggcaaggttcagcaccgcgcgcttgcgggcgtccggcatgataaagcccagcgggttattgcagtttggcacgaggatcacccctttgatcggccactgatccagcgccagctccagggcctcgatgctgatcccggtttccggatcggtggggatctcaatggtctttaatcccagcccgcgcagcatctgcatggtgccgtagtagcagggggattcaacggcgatgatgtcccctggctgacacaccgacagcagggccagcgacagcgcgctgtggcagccgctggtgagcaccagatcgtcggcagttaccaccgatccgccgtcgagcatcaggcgggcgatctgctcccgtagctcgcgacgcccggccagttcgtcatagttcaaaacctcagtgaggttgtgctggatagcccggctcagttcacgccagatgggcttcaggcttggctgcgtcacgtccggcgagccgccgccgaaggggatgatcgatttatcgtagcgggcgtcaagcatggtcagcacctgatcccactgggtgatctccaccgggcgctggaccggacgcgacatcggcggcaccggcggctgggctttgcgcggggcgacgaaatagcccgatcgcggctgcggcacaatcatctgctgctgctcaagcagctgataggcctgctggacggtgctgatgctgacgccgtgctcctggctcaggctgcgcaccgacggcagcttttcgccatggcgatacaggccctgttcgatgcgttcggccagcagcgtagcgagatgttggtagcgggtcatgctgtatccttaattgccgccatacagatggaataaccagtacagatgggcgtaaaaattgggctctggtgtacgttttagctaatctgtatgttaaagaaaagcgttttgtgaatctgtattccgtacccccaaatccgtgaagataaagcctctggcatggtgaggaggtagaggatggaatttcacgagaacagggcaagacagccatttatcggtttcgtattgctggtgcggtttatcaaaaaatggtggcttcaggagcaaacgcgcagagttttgcagcaaatgagcgacgaacagctgaaagatatcggcctgcgtcgggaccagatcaattaaaacgtgcggttttttacaggcaaaccttcttcattatcccggtgagcgcaaagtgccgccgggatacattcacgaaatttatcaattgatgcggcacgagcttccgtttcttgatacttaccctgataagtattattttcttctcaataatgagaggaagacccgtgactgaagacgaactgtttgcccgccgcccgctggggatgcggatggctatggtggtgcgccagtggcgcgccattattgactccgctatcaccgataccggactcacccagtccagctggacggtgctgatgcaactgcatcagctgggagacaacgtctcggtcagcgaactggcggaggtgcagggcattgaactgcctccgctaatgcgcaccctctcattactggaaaagcagggctatctggtgcgttccacatcgccatatgacaaacgcattcgcctgctgacgctgaccgccgaggggcgggctattctggaaaaactgagctgcgtgatcgagacctatcaggagcgcgtaacccagaccatcccggaggccgatctcgccaccttcagcgccacgttaaatcaaatcgcctgccgtttgcggaatatccgcgaagaagataacaagatctaacacactatgatgacgcctgaacaaaaatttgcccgctgggtacgggtgagtattgccgcttttctgggaatattcgcctggtttatcgttgccgatatctggatcccgctgacgccggactccaccgtcatgcgcgtggtgaccccggtttcgtcgcgggtctccggctatgtctcgcacgtctacgtgcacaacaacagccaggtgaaaaagggcgacctgctgtatgagctcgacccaacgccattcattaataaagttgaagcggcgcagatcgccctcgagcaggcgaaactgagcaaccagcagctggacgcgcaaatcgccgccgcccgcgccaacctgcgcaccgcgcagtacaccgcgcgtaacgataaggtcaccctcgatcgctaccagcgcttgagtacgatgcagaacgtctcgcagtccgacctcgataaggtgcggaccacctggcagaccagcgagcagtcggtctcggcgctgaacgcgcagatccagaacctgctgatccagcgcggcgagcgcgacgataagcgcaacgtcaccctgcagaaataccgcaacgcgctggaggaggcgcagctgaacctggcctggaccaaagtgcgtgcggaaactgacggtatggtcagcaacctgcagctgaacccggggatctacgccaccgcggcgacggctgtgctggcgctggtcaacaacaacactgacatcgtcgctgacttccgcgaaaaaagcctgcgccacaccgcggtgaataccgatgcggcggtggtctttgacgccctgccgggtcaagtcttcccggcgcacgtgaccagcagcgacgccgggattctggcgggacaggaggcggtgaacggtcagctgtcgcagccggagcagtccacccgctgggtgcgcgacgcccagcggatgcgcattcacgtcgcgctggatcagccgctggacaaaccgctgccgaccggcgctcgcgccacggtgcagctgtacaatagcgagggacctttcgcccgcaccttcgccggcctgcagatccacctggtgagctggttgcactatgtctattaataccctggcgcatgtctttaccccgcacggcaatatcgtctacacggcgaatgattttcgccagacggtgcgtatcgccgtggccgggaccattgcgctcagcatctccaccttctacgacgtacagtacggcgtatttttcgtcgtttatccgctgatgctgatgtcgctggtaccgatgttcaacctgcacgtcgcccgccagtttatatttagcgcggcggtaaactgtgtcgaaatggtgctaattgtcggctatttgtcgcagtggccggtgatcatgaccctggtggtgtttgccctgtacgtgatgcgtttccgctttatgagccagggaccgctgttcctgttgggatcgatgggggtggtgtgccagagcacgatgctcaactttatgagctatcccaccagcaactggcacaccctgatgttctccaatatggaagcctgcgtgatggccgtggcgctgagcgcgctgctgcattacctgatcccggacgtcgaaccgcgcaagccgccgccgcggattgagaaagacgccgcccgcatccgtcatgagtcgctgctctccggtacggtagcgacgatcatctttgtggtgtttcagatctgcgatctcagcgactcgctgtcggcgctgatggccgggatcctgatcctgttcccgatgcactatcgcggggcggtgatcagctcgatctggcgcgtcgtcggggtggtgctggcctgtctctatatactggtagtgcagctgattatctatgatttcagcaaccacatgatcctgatgatgccgctgattggtctcgggctggccttcagcgcccgcctccacgtgatggagaaagtgggcgccggggtgggcttcgccagcatcactaccatcggcattatgttcggccagaatttgcatccgtatcaggatctggtgttcagcgatctgtaccgcatcacctcggtgacggtctcgctggtggtgacgctgaccctggtttttctcatgcaccgcctgctgaactgtttcgcggcgacgcgttttgtggtgagcgattaacctgcaggtgggaaggtggcgagacagcgccatgcttccccgttctgctgatacagcgccgccgtctgttccgggacgatccagcctcgcgcatcggcttccgtcccctccagcaggatgcacagcccgcagccgctgcgcagctggcggggtatatctttgacctcgaaggccactcccgccgcctgcagggctttgcgcatccgcaccacccccaccgtggagtgaaataaaaacagaaacgttgtcatccgcgcctccgctggcgctggccgatcagagccgcgccgatcgccccggcaaactgggcgtcgggatgggttgtcaccgccatgccgacatggctttccagcatccgggcaaaggcggcgcagtggctgacgccgccggtaaacagcagcggcccctgcgccgataagcggccaataaagttcgcgctgcgccgggccatggcgttaatcacccccgccagaatcgcctccggcgcgacaccggccgaccgcaggctaatgacctccgattcggcaaacaccgtgcacatactggtaatggcgtgcggttccacgccgtcggtaatggcgtccagttgttcgacgctggcgccgagggtgcgtgaaatgacttccagaaagcggccggtgccggcggcgcatttgtcattcatcaggaagtcgctgaggttgcccccggcgtccagctggataactttgctgtcctggccgccgatatcaatcaccgtgcgggtgtccggcgacagcaggcgggcgccgaggccgtgacaagagatctccgtcacctgcttatcggcaaaatccaccagctggcggccatagccggtgagggttaaaaaaggcgtctccgtgaggccagcgcgcagtgtctcccaggcctcgtggatggcgtcggcggggcgaaagggggtggggcagaggaagcggcgcacgatgacgccgtccgccagcaggatgccttttgtggcggtggagccggaatcaatgccaaccgtatagttcacgccagctccttacagcatttcgataaaggcggcgacgcgggtgctgagctggccgaggtccgctgtcgaatagtcggtttcaatcgccatgtaaggaagatcgtgctgttggcgcagatggcgtttaatcgccagcgattccacggcataggtatggcaggcctgcaaaatgacgtcgatcaccccgtcggcctgatactcctccgccatctggctcagcagctgcagacgctggtcgttgggggaaatacaggagcagccgatggcgagatatttatcggttaaggcgtcgtagacgtcgccctcttccgccacgcagcgctcggtcgctttcgcgccggtgcagttctcatagccgaccacccagccgccgttttcctcgatggcgcggaccactttttccgccgcgccgccgatcgggcagccggtgatcaggatccgcggacgaggttccagccgtttaccctgctgccactcctgatggatgcgctccgccatggcatgcagttcatcaatcagggcggttttgtcgaaacgaaaagtggcgccgtacaccactttcaggatgtcgccgccgctgagcgccggcggattgagctgcccgagacgataaaagtgggccagcgcccggcgctcgcgatttttcaacactatggcttcgcgcagcgccgcctcgctaatcggcgtgccaaaccgggcctcaatcacctgctgcaggcgcaggatctccgttttccacagtgcgcgcgaggcggcatcgctggcgctgttcggcaactgcatgacgtggaccgccttgaactcggccatgtactcatacattttctttttgccgtcgcaggtggtttccccaaccaccaggtcagagaaatagaagtagggacatttatcggttttgccgaagccgtagctgcttttgataagcgggcagaggttgcgcgggagatctttttccgcttcctcgatggtttcatcggaggttgagcacagcgagacgacaacggcgcccgccgccatggcgatctcctggggcataaaggtgcagtaagtgcccaccagcggtacgttctgctctttaagatccatgacggtgagaaagcccttctggcgagcttctgagaactggtcaaaaatggcgggtagatcggtgataagcgacatggttttccttccccgtacacgggagatgctgaaagagtcgccattatagccatggtgtatgcagggttttattgatctcctgcgtctgtacgcggtgttaatagacctttttcaaatccatctcttcctggatacgctcgctccatgcctgatgggtgcggatggcctcttcgataccggcgttgtaaaacagcggccccagctctttggcgataaagtcgacgaaaaattcggcgtcaaactgctccagttcgaggtcgaaggtctctgcgcagtacttgctgagcctgtcgcgcagcaggtcgcgctgcgcctggctgagttcaatgtcattcatgatggggctttctccgtaaaagggctcacgactgccgggcttcgatcaccgcttgtccgcgctggtggcgtaacagtccggccaggcagcaggcggcgacaatcccggcggccaccgccaacaggtggaaggggagtctgccgccatggaaccacagccagcgcgcgccttcaattgataacgcgctgacgctgaggatcacgatattcagcgaggcggagaccgtgcctttcggcaggtcgttggaaaagagggtaaagcgaaacagcgtcgggaaaatcagcccgatgccgaaggcgtagaagcaggtgccgaccaccgaccacagccagacgtggggccataccagattgccaacgatcaggatggccaggccgagcatctgtaccggcaccgcgctgaggacaaagcgcgggcgggtggggtcttttacccagcgcgccaccgacaggttggcgatgataacggcgctgaagaccggcacctggctccaggcgaactcgctggtggtcagtccgccggcgtccattaaaatcaccggcgataccgccacccagctcatcagcggaatatagctcagcgacagcgtggcggcgccgagtaaaaagatgcggttgcgaaagacgttgcgaaaatcgcgcagcacgcccagggggctgaacggcacatcgccgcggcgcaccgtctccggcatggtcaacagcaggccgagccaggccaccaatcccatggcggcgataatgccgaacagcgctttccagtgaatgaaatgcatcagcgccgcgccggagagcggaccgacgatcggcgccaccagcacgacggaggtgatcaccgccatcagtctgatcgatcttttttcctcaaaggcctcttgtacggtgacgtagccgacggtggctataaagcagatgctggtgccctgcacgaagcgggcaatcaggaactgcgtcatggaggtggtgaacagggtcgccaggcatgcgagggtgaaaatcagcgcgccggtgagcagcaccggacgccgtcctatccggtcagagagcggccccagcagccactgtagcgccatgccgccggccatatacaggctcaccgaggccggagccagcgccacatcagcattgaaatcccgcaccacgtgcaggatccccggctggatcagatcggtagtgagataagcggaaaaatcatacagaattaacgccgccgggaagaacagcgcggcggcgtgtcggctcagccagtgggaaatcctgtgcatcatctcgccctccctgtggaatatttatcagcgctattgttcggatagtatcattgctaaccaatatgcagatgcagcagcgaggggatctgcgagagcagccacaacaacaggccgatggttccccccaccagggtaccgttgatgcggatgaactgcagatctttaccgatattgagctcgatctgccgcgacatatcgcgggcgtcccagctcttcactgtgtcgctgatatggcgggtgaggaaggcggcgaactccggcgccacccggtgcgccgcctgctccaggtgttcgttaagcgattcgcgcagcgcgtcgtcgcggagtaaggtttcaccgaaccactgccccgcctcggcgatacgctgcttaatacgtgagtcgtcgctgctgatatcgttttttacccagccgcgcaggtcgccccatacttcgccaagatagtggttaaaggtctcatcattttttagccaggctttgatgttatcggccttctgcgccatatccgggtcggatttcaggttatcgataagcttttgcacggcgcggtcaaaagtctgacggatctgatgcgtacggtcgtgagtcacctcgtccagcagggtattcaccgcgtcggtgaccatctcagcgctgtgctcgccgagccactcggtgggtaggagtttggccttcagcgggtgttcggtctccagccagtgtacgatgccgcgggcgataaaggcgcgggagctgtcgcgctgcagcagggcaatcagttggtttatcagcgaatcgagcagcttttgatggcgattgtcgcgggtcagtccctccagcatcatggcgctggtctgcgtcaggtcgaccttatcgatagccttatgcaccgcgcgtcgcagcagacgttgaatgcgcgcgtcatcggtcagttcgagaaaaccgctcatcacctgcagcaggtgctggccgacccgtcgggcgttctccggctggctgaaccagttgccgagcatcagggctggctgatagcggcggatcagcgcgaccagcgacggggtatcaaggaacttttcctcaacaaagcggccgaggttgtcggcgatgcggtctttattgcgtggaataatcgccgtatggcgggcgacaaagggcagcggaatacggcgaaacagagccacgaccgcaaaccagtcggccagcgccccgaccatcgccgcttcggaaatagcttttagcgcaccgacccagggcgacggtggtagcgcgagggtagtgataaaaagggcggctgcaatcagcagcagcgacagcgccagcagtttggcgcgtttcagttcagcgagtttttccatatgcttaagcatatagcctgacggcgaggtcgtgcaaaaatcgccagataatccccaggccgaagagcatcaggatcgctcccgccgcccgctcgactcgccagacgatggcgcccaggcggcgctgtatctgcggcagcgcaatcgcgctcaccagcagtaaatcccagaagaacaccacgctgaccatccacagcccgctcaccgtttgctgaagcagggtcacagccggcccgagcagggaagtcatcagcgccagataaaacagggcgtttttggggttgagcagcgatgaccccagccccagcagcagctgcctgccgaaccccggacgcgctgcgcgaacgctctccatcgccagcgtcgcgggacggctgcgtatcagcaggctgccaatccacaataaatagcccgcgcccagcagctcgatgagcaaaaaaagcagcggcgcctggcgcagaagcccccagccgacgatggcgagcacaatatacagcgcattgcctgcggcgatgccgagacacaatccgatgctgccgcggatccggtagcgcacggcgtagccgaccagcagaaaaaaatcagggcccggactgagcagagcgacaaagtgggacagggctaacgccgggaaggcggcgggaaagagcgtcgataaggtatgcatagtggcctcgataatggtgcagaggccaccctacgccaggtggcgtattacttattgtcagatattgatctgctttgcgcatactgccgcggcgtggcggcggtatagctgacaaaggttttatggaaatggctctgatcggcaaagccagcctgatagccaacgtcggcgataggatccccggcgcgtaagcgcgttttcgcatattcgatgcgcgccatgttgatcaaactggcaggcgtcaggccggtatcttgtttcacggcgcggataacggtctctttacgaagcgcgctgtcgtgggccagcttatccagcgacggcgacgccggcagatccatcgccaggcactgaaacagcagggcgctggcgtgatgtggcgcctgcggcgcggcggcgcacagcggcagcgcgtgcaggagttgcgccagccgggcgggcagttgttcaaggctcccgcggttcatcagggcgacaacctgctggaaactggcaaagagagggctgtcgcgcagcagcggctgcggcgaggtgatactggcgccagggggaatatccgggcgctgcgcgcggcaccatgtcgcgtccaggtaaagcatgtgatagctgcgcggcctgtcatgcagcggattacagctatgcggcgcgtgcggcgggatcacgatcagatccccgggctgcagcaggtactcctggccagcgcacaggcagcgcgtttccccctcgataatcgcccccaccgagagctgggggtggctgtggcgcttataggcctggcggctgcgccaggtgctgcgcagctccagccacggcagacgatcgtctcgccagaaggtttggggaatatctcgggtatggttcactgctttggcctttgctgcggggataagccgtttatagcatgctgcgccgaggctgtcgcccgcctggatttgcgtaccgcgtcgaaaaaggatgtcacgcttgcagtccggggaaatatgttttcgtagcggaatgtaaaatcccggtttccggggtgccagagacattcatgggatgtagagtccctgcaggataagcaggcagggatgagccgatggcaaagggcaccacctcgacgccgcatgatgcggtgtttaaacagttcctcactcaggccgacaccgcgcgcgattttctggcgatccatctaccgcctgcgctgcgtcagcgctgcgacctcgataccttacagctggagtcggcaagctttatcgaggagagcctgcgggcctggtactccgatgtgctgtggtcactcaaaaccgcctctggcgagggctacatttatgtggttatcgaacatcagagctcgccggatgcgcagatggccttccgcctgatgcgctacgccatcgccgcgatgcagcgccatcttgatggcggtcatacaaaactgccgctgatggtgccgatgctgttctatcacggagcgaccacgccatacccgtggtcactcaactggctggactgttttgccgatccacagctggcgagtgagctttatatctcgccctttccgctggtggatgtcacggtgatccccgacgatgagatcgttcgccaccggcgcgtggcattactcgagctgatacagaagcatattcgccagcgcgatttaatgggcattgttgagcaactgacgacgattttacttagcggggacgctaatgacagacagctaaaaacgctgtttaattatctgctgcagactggcaacgcgcgccgctttggccggtttatccacgaagtggcgcaacgggttcctcagcacagggagagattgatgactattgctgaaagattacaggaagtgggccgcagaaaaggcaagcgtgaaggacagcatgccgaggcgctgcgcattgcccagaggatgctggccgacggcattgcccgcgagacggtggtgaaaatcaccggcctgaccgccgacgagatcgccgcgctggcgcattgataacgccggggcggcctgacggtcgccccggttagcctctttatggaatattccggatatacctaactttacccgcatcgccagccatctcgactacccttaatatccttaacggcatttttgactgccttagtagcgataacaaggagacatgcgatatggcctatcagacggtgaatcctgcgaacaatcagcttattaaaacgtacccggcgcacagcgatgcggatgtggaggcggcgctgcagcaggcggatgcgctctaccattctgcttgggcaaaaggcgatattgaaccgcggctggcggtactgcataagctggcggatctgatcgatagccgggcggaggagctggcaaaaatcgctagccaggagatggggaaactcattaagcagagccgcggcgaagtgaaactttgcgcgcagatcgcccgctattacgccgataacgccaaatcgttcctggcgccggtgaagtatccctccgaactgggtgaagcctgggttgagcaccatcccattggcgtcttactggcggtggagccgtggaacttcccctattaccagctgatgcgcgtccttgcgccaaacctggcggccggtaacccggttatcgccaaacacgccagcattgtgccgcactgcgcggagacctttgcccatctggtgcgtgaggccggcgctccggagggggcgtggactaacctgtttatctcccaggatcaggtggcgaagattatcgccgacgatcgcgtgcagggcgcggcgctcaccgggtcggagaaagccggcagcgtggtggcggcgcaggcggcgaagcatattaagaaatcaacgctggaactgggcggcaatgatgtgtttgtcgtgctggacgatgccgacctggagcgcgcggtgaaaatcggcgtccaggcgcggctgaacaacgccggccaggtgtgtaccgctgccaagcgctttatcctgcacgaaaatatcgcggatgcgttcctgacaaaatttagcgaggcgtttcgccaggtgaaaatcggcgatccgctggatgaaagcaccacgctggggccgctctcttccaaagatgcgctggataccctaagcaaacaggtggacgaggcggtgaaaaatggcgctaagctgcatctgggcggcaaagcggtggctcgagaaggcaatttctttgaacccaccattttgaccggtatcacccgtgataatccggcgtacttcgaagagttctttggcccggtggcgcagatctacgtggtgaaaaacgatgaggaggcaatccagctggccaatgattcccactatggtctgggcggcgcggtgttcagtcaggatatcgaacgcgccaaacggatggcctccgccattgaaaccggaatggtttatatcaactggctcaccgataccgcgccggagctgccgtttggcggcgtgaagcgttccggttacggacgggagctctccgatctcggcatcaaagagtttgtgaaccagaagctggtggtggtgcgccgctaagcctatgacccggccataaaaaaacctgccattcggcaggtttttttatggctaatgctcagcgcaccttaactttatcgcggggcgttgatcataatcagaaggtgaccccgccgcccacataggcgccatcaatcagggtgtggttcgggcgaccctctttaccgtcaacgctcacatggcggtaacccactttcaacgtcactggaccaatcggagaccagctcacgccgccgttcgcttcaacatagtttttcacgctgttgttcagaccatccggcgcgacatacccttcgccaaacacgtggatgctgtcggtcagggccacgttcaccccgccgccgaccggaaacgcgacgccgttatcgccttttttcggcccgaggtagatggctttcgcgccggcgttgagcatcaccgggcccacttccaggttgtaacccgcgcccacgccgccggtctggctaccatcatcggtattcttcagccagtggctttcggcgtacaggccagaagaggatttacccatttccatattcagattagtgaagtttttaccctgttcaacggtaaaccccaccgccatggcggaaccagagaccgcggtcagggctgcaagaataaggatgttaagctttctcatggtttactcctcgtcaataaagttgtctgagggcaccttaacaagcgatgtttacctctgcaaatgtgacttgcgtcgattttttatgctggttttgtcaggaaggtgttttgaaaatgttgtaatgacgtttggttacggcgaggtcaatcagcaaatttagcctgtttagccgtggtttaattggtgggctaaacagaaactgaacagagcagtcattaattattaaggggcctattcattcagtttcttataatttccaaaaatgtttctactgttacttattaaaacgttgctttacatttttcgacgcgctgccgacgtttggtccctgtttttgacgaggtctcagagagaagggggcctgcgccttagggcgcaggcgggcaggttagcgtcgtaacccggcaaacgccgcgcgaatttcctcttccggcaactgaatgccgataaacaccagcgtgctgtgcggcgtttcatcgccccatgggcgatcccagtcggcgctgtagaggcgctgcacgccctggaacagcaggcgatttggctcgccgtcgatccacagcatgcctttataacgcatcaattgctcggcgaaggagagcagcagattttccattacccgtgaaacttcactgatatccaccggatagtcgagctcgaccacaatcgacgagacgtcattctgtttttctgccacaaaatgaaagcgcggtgtggcgctgacaaccttctcttccagcataaaaccgctggtgttaaacaactggcttaaatcgatatcgccgtgaatgacggtataaatcggcgcccgcgcgttaatgcgcgccagccgttcacgcagcttttcggtgtcgccggcgacgtcggttttggttaacaggatccggtccgcgtagccgacctgcgactgggcgatggtgaactgatccatctgctggtcggcatggacggcgtccaccagggcgatcacgccgtccagcagatagcgctcgcagagcacctgatgggagaaaaaggtctggataatcggccccgggtcggccatgccggtgcattcaatcaccagccggtcaaactcgatttcgccgcgatcgcgactgtcgaggagatcgagcagggcgtcttccagttcgttggagcgtgtacagcagatacagccgttggtcagggttttaatctgcgtggcgcggtcgccgatgagctgatcgtcgacggagacttcgccgaattcgttttcaattacggcgattttgaaaccgtgctgctcattgaggatatggcgcaggagggtggtttttcctgcgccgagaaaaccggtgagtagggtgactgcaatcggtgccattattgcctccattaacagcagcgtacgccgcctttgccgtcgccgccgtagcgggcctgctgacgttcgcggaagaattcttcataagtcatgtacggctgatccggatggttggtttgcatatgcgtgacgtagttgtcgtaatccggaatgccaatcagcatttttgccgcctgaccgagatatttttttgcctgacctaagttaccaaacattataagttccagataacgaataaagccggatggcggctagcgccatatccggcctacgttaatgcgcttttggtaggccggatacgcgtagcgctatccggcatcagggttaatgatgtgacgaggtcttcacgccgccttccggtaccggcacatacggagtctctttgtcggtacgcaccttattgttgcggacattgagccaggttttgatgccgtagaagatgatgctatacaccaccaccaggaacagaatactcaggccggcgttggtgtagttgttgaccacgatatggttcatgttggcgatctgctgcgcggtcagctcgccgccggcggcaatcttctctttatactgctgagccataaagaagaagccttccatctgcgggttgctgctgaacagcttcaggcccagcgcccaggtggtgcacagcagcagccatgccgccgggataacggtgacccagatatatttggtgcgctgcatcttgaccagcaccacggtgccaagcaccagcgccacggcggccagcatctggttagagatcccgaacagcggccacaggctcttcacgccgcccagcgggtcgaccacgccctgatacagcaggtagccccacagcccgacgcagccggcggtaccgataatcccggcgaccagcgagtcggtttttttcaggaacggcacgaagttacccaacagatcctgcagcataaagcggcctgcgcgggtacccgcatccagcgcggtgaggataaacagcgcttcaaacaggataccgaagtggtaccagaagcccatatccgccatcgggatgattttatggaatacgtgggcgataccgacggccagcgtcggcgcgccgccagcgcggttcagtaccgaaggttcgccgatatctttcgccgtctgcaggatctgctcaggtgaaatcacaaagccccaggagctgacggtcgccgccgcgtggacggtgacttctttcaactgcgctgcgatcatcgccgcgttttcaccgcccatttcatgcaggttcggcatgacgatgcccaggcctgccggcggggtgttcatcgcgaaataaaggcccggttcgataatcgaggcggcgaccagcgccatgactgcaacaaaggattccatcagcatcgcgccgtagccaataaagcgggcatcggtttcgttggccagcagcttcggcgtggtgccggaggcgatcagcgcgtggaagccggagaccgcgccgcaggcgatggtgataaacaggaacgggaacagcgcgcctttccacagcggaccggtaccatcaatgtactgggtcactgccggcattttcaggtccgggttgaggataacgatccccagcgccaggccgacgattacgccgattttcaggaaggtggccagataatcgcgcggcgccagaatcagccataccggcagcagcgcggaaatgaacgcgtagccaatcagggtaaaggtgatagtggtatctttaaaggtcaacgccgggccccagtacgggtcgtgggcaatcacgccgccgaaccagatagaggccaccagcagcacgataccgataaccgacacttcaccgacgcggcctgggcgcaggaagcgcatgtagatccccataaacagggcgataggcaccgtcgagcagacggtaaacacgccccacgggctttccgccagcgctttcaccacgatgagcgccagcaccgcgaggatgatgatcataatcaggaagcagccgaacagggcgatagagcccggaaccggccccatctcctgtttaatcatctcgcccagcgaggcgccgttacgccgcgaggagataaacagcaccatgaagtcctgtaccgcgcccgccagcaccacgccggccagcagccacagggtgcccggcagatagcccatctgcgcggccagtaccgggccaaccagcgggccagcgccggcgatcgcggcaaagtggtggccaaacagcacgtagcggttggttggcacatagttcaggccatcgttattaatgaccgccggcgtggagcgcgtcgggtcaagcttcatcaccttctgcgcgatgtacaggctgtaataacggtaggcgacgaggtacacagaaaccgatgcgacgacgatccacagggcgctgacgtgctcaccgcggcgtagggcgacgactgagaggcaaaatgccccgatgattccgagaatcacccagggtatgtgcttgaatagttttttggtatccatagtaaaacctggcgttaattagatgaataattggccgaagccgtctggttttaagttagggttgatggaggtattgattagctaggctgccttcgatcttgccagaacagcgcgcgcgtaaagttgggtaaatcggtgagtggttgtatagggggttaagcggttacttgcgggggtaagcggttagatatgagtacgagagcgcgtaaatgtgtgattaagctcacaatattattctgcgcatctcaaagatatgctttcaaactgaggataacgatttttatcacccgcagatcactatctttatttcaagtaaaggtattttgatattatgctgactttgccatgtcgtatggatagcgtttaacaaagggaattcgagttatgaaatttgtaaagataatgatcatcgccagtgctttttacttaacatatgctcatgcaagagagatacatcaggctgttgatgagccggcagccccttataatttgcgctgggggatgagttacgatgaggccagaaacacgcctttatattctctggaggtatcagatatcaattatgccggaaaagacccggatctgattatctcaacgctgactccccaggaagtgggggcgttgaaatatcaggagatgaagctttatttcgataagaataaagggctgaaaagtgtttttgttagcgctgatgttgattccagtcagcaggcctataaagttgatgatggccgggaagcactcgccttatataatgaggaagttaaggttcttgatcgagaatatgggccagcgacaatcaaagaagagttcattgcagaaaaagggaaattctatcaaagtctttccgcctgcattgcaaaacagcaggagtggtataataaaagattagatctgaataaaataaaaaattgttcaacctggcaacgtacttataaaaaaggtcgggtaaccgttttgctatacatcgaaccgagacaagtttccaaacattatatttataaataaattaaaggacttaacggtgagaatatataagattttttttagaagtattgccatggtcattatggttatgatcctttctgattgtcgtcagtcgtattatattgccagaaatacggggcgcaatataatgaccttatccgaccatcagcgcgctaaatcggcgttaaacgctaacgatttaaatgcagctcagggctacctgacgggagaaaaatacaataatcgctacaggcctgttagcggtgaggaatcctggggaagtttacaatatcgggcggcgaaaatcgtcgccaacgccgcggcgaacggtcaaaaagtgcgtgatgatgcgctctatctcgcttatatctctttgtttgaagcagaagagggagtgcccgaacatcccgatattatgttgggttacatgcataaagccatggcgctactgttagcgaatccgcaattactcgataaaatcgattctaaaaatgtcagtactttacccagccagtttacccttgaacgctatgctgtatggcaatatttatacgatggcggcgagattgactggaccaaaaaagcgcctgaaggtgaaggttatacaattgctggtgaaagctatcagacctggaatatcaagttaaaaaaagccatctggaatcggggagacgcttttttaataaatataggtaaacaacaatttattcatgacgctatagattattcgcaatttccggttattgcctgtaccgccaggcgaaaaggctggcacttaacattacctgctgactaccgggaacaaaatttccgcggcggtggacgttttgattgggcttcatgtcgcgctgttgaataaggctggcgggtgagatgacgcatattaagcgccaggtttacgtatcgggcgataagtaaacctgggcgcggattttagactgcgacttccatttccatcatcaccggatggaaacggcgtttaaagtaaatcaggccgtgcccttgcgggctcagggtaatattcctgatctccaccagatacaccaggtgggtaccgatggtttgcacctggctaatttcgccttcgaggctggccagcgaacccttcagcaccggctgcccgagcgcgccctgttgccagccgctgagggcaaaccgttcttccatcgtcaccccggtcatcccggcgaaatgacgggccatgatttcctgctcgtggttcagcacgttgatgcacaacttgccgttgccctgaaacaccgggttcatcgcgctgttggcgttgatacaaaccatcaccgatggcggcgtatccgtcaccgagcataccgccgtggcggtaatgccgcagcggccggcttcgcctgcggtggtgacaacgttaaccgccgccgacaggctggccatggcatcgcgaaaacgcaggcgttgttcatctatttgcattatgacctcccgctgtgaattacttcagcagcttatccaacatgttgatatcagcgttattgtgcagatgcggcaccgtccagccgttctggtcgtactcggacaggcagcggtcgaccatcgccatcatcttgtccatattgccggagctctgcgcctggcgcagacactgcaggcgaatttcatcctggctaccggagtagttgatttcatacagttcatggcggccgccaaattcgctgccgatggcgtcccacatcagtttgaggatcttgatacgttcaacgtgatccataccgttggagccgcgcacgtacttcgccagatactgatcgatctgcgggttgttcagatcgcgggcgctggacggcagataaatcaggccgctggtgacgttgcgctcgatgatgttcttgatcttggcgtaggccatcggggccatcacgcgataggtctgcagcgcggcgtgatccggcagccatgcgccgttgacccacggcgtcgcttccgagcacatagaatcgcttaacgcccagaacatattgcgccacgccaccacttcgccaaggtcggcctgcacgccgcggaattcgagggtgccggtacattccagagagcgtttcagcagggcggtgataaagtccagttttaccgccaggcgcacgcaggcctgcagcgggtacatgcgggcgaaaccaccttccatggtccagcggcggcagcggtcaaagtcgcggtaaatcagcacgttctcccaggggatcagcactttatccattaccagaatcgcgtcgttctcgtcgaaacggctggaaagcggatagtcgtacggcgatccggtcgcaccggcgaccatctcataggaggcgcgggagataagcttgacgccttcggcatccatcggcgcgacgaacatcagcgcgaagtccgggttctcgcccatcacctgtgcggagccgaagccgatcatgttgtagtgggtcagcgccgagttggtggcgaccactttcgcgccgctgacgatgatcccggcatcggtctctttttccagcttgatgtagacattcttcacttcatcagctggcttgtggcggtcaatcggcgggttgacgatagcgtggttaaagtacaggccggtttcctgaatgcgggtgtaccagttgcgggcgttctgctcgaactggccgtaaaacgccgggttggcgcccagcgcgcagccgaaggcggctttgtagtctggggtgcggcccatccagccgtagcttaagcgcgaccattcggcgatggcgtcgcgctgctggcgcagatcgtcggcgcttttcgccacgcggaagaatttatgggtgtagccgccgctgccggtatcggtgccccagcacagggaatcctgcatctccggtttgtgcagcgcatcgtacagctgagcgacggaggccgcggcattacggaaggccggatgcgtggtgacgtctttcacgcgctcgccgtagatataaatttcgcggccatcctgcaggctttttaaatactcttcaccggttaacgggcgtttcgcgtcggcgcggaaatcttcaggtttcataggggcctcttcagtatttatcggaataatgatgttaaatatatgttttgtttttgttgtttaattgaagcggttatggcgcttgtcgtgaagggacgtttgcgacaacggcgggtacttttcaggcgggagtgaattttgtgatctctgcaacttttaccggctggcgcggcgctgacccgccctacggtctatagcccaggcaagcgcagcgccgccgggtattacgacacaggtactttttgcgcccggtagctgctgggcgagcagccgacctggcggctaaaaaagcgcgcaaaataggcggggtctttaaaccccagctgccaggcaatctcattgaccgcgctatcggagaacagcagcaggcgcttcgcctcgcgcagctgacggtcaaatatcagccgcttcggcgaacggttggcgaagcggcgacagatgtcggtcaaccgcgattcggtcagatgcagctccctggcgtaatccggtaccgtccagtgctgatggtagtggccgtcgatcatctggttaaagcgctggaatagcttcagctcgccgcgcatcccgctggcggcgtgatcgtcgagctttgcgttacgcagcagcagggtaaagaccgcctgcgccagtagcgccagggtatgctcccgccccggcaactgggcggtagattcccggcgaatcagctgccagtagtgggccagcgccgccagctcgtcgggtttatccgccagcgacaggcagatccccggcaggccgaaggtctcccgcgtgccgggataaagcacctccagcagcggccagatcagctcctcatggaccgtcaacacatggccatcgctatcggactcggtaataaaagcgtgcggtaccgagggcggcgttatcacaaacagcggcgcctgcaccgaatagcgatggtcatcaagctgcagctcaatctgtccggtatcaaggtagtgcatctggaaatagcggtcgtggcgatgcgcctgcatgtcgcggccaaaaaaggccgccatgcgggagaacgactggtagtgcacctcttcggtacccagactctcgtcgtaatctttattgatgtcgatgttggcgatggaatgctggcacatacccgctccttagtggcctttttgcgccgctaagcccggcgcggcggcgtcctcacgctggctcattggaatgcgggtaagcaccagcgcgccgacgataagtaatccggcgacaaaccacagcccggagctaaagctgccggtggtatcgcgcaaaatgccgatcaacagcgggctgacggcagagccgacgttgccgatagcgttgatcaccgccaacgccaccgcgcgtgactgcaggctgatcacccgatccggggtggtccagaaaatggccatcgcggtaaaggatcccacagaagccataataatgccgatcagttggatcaggctgtggtgcgttgccgaagccagcagccaacccgccgcggcgaacaggtagggcaggatggtatgcatcttgcgctctttgcggcggtcggatcggcggctccaccagatcatgccgaaaatagtgcagaactgcgggatcgccgccagcaggccaatcatgatgttgctgctgccggtgttgaagctctgcaggatctgcggcgtccagatattaatggcgctgagggtattggtcaggcagaagtaggcgagggtatacatcagcaccgctggcgtcagtacttcgcgcagcgtggaacgcggcgaagccgggacgattgccgcatgttcccgctcgcgatcgatcatcgccttcagcgcctgtttttcttcgttgtccagccagttggctttatccggcgtgtcgttgaggaagaaccaggtgacgacgccgagcaccaccgacggcaggccttccagcagaaatagccattgccagcctttcaggttccacaggccgtcgagcgccagaatatagccggaaagtatcgagccgagcatcatggtcaccggcatggcgatcataaacagggcgttggcgcgggcgcgatggtaggccgggaaccaccaggtcagatagacgaggatccccggcagaaaaccagcctcggcgatgccgaccagcatgcgcaggatgtacagcgtatgcgggctggtggcgaacatggtgcaggtcgaggcgatcccccagaccaccatgatcccggcgatccagcggcgcgcgccaactttcgccagcatgatattgctggggatcccgcacagcacgtaggtgacgtagaacagcgtcgccgccaggccgaacatggtggaggtcaggccgagatctttacccatcgtcagaccggcaaagccgatattaattcgatccaaaaatgagaaaacaaagagaacaaacaggaaggtaatcaggcggcggaacagctttttgatcactcggttttctacttcaacggctttattatcattgtgttgcagggtagaggtagtcatgttgcgctccacattatccgttcaatagacggatttattgttatcggttgtggtggttgcgttgtgggtaaaccgggccgccagcgcttctgcgccgcgggccagcagggtggtatcgacgccgacggcgacgaacagcgcgccctgttcgagatagcgtttcgccagctgttcattggccatcaggatccccggcgcctttccggcctggcggatttgctggatggcatcttcaatggcggcctgcacttccgggtgttgtgggttgccgccgtggcccatatcagcgctgagatccgccgggccgataaacacaccatctaccccgtcgacatcgaggatctgcggcagatttttcagcgcttcgcgagtctcaatctgtaccagcacgcacatggcgtcattggcctggtggatataatccgggacgcgattccagcgcgaggcgcgggccagcgcgctaccgacgccgcggatgccggctggcgggtagcgggtggctctgaccgccagccgcgcttcttcggcgttctgcaccatcggcaccagcagggtctgtgcgccgacgtccagcagttgtttaatttgtaccggatcgttccacgacggacgcaccaccggctggctggggtagggcgcaatggcctgaagctgggtcagcaccgttggtacattgttgggcgcgtgttcgccgtcgatcagcagccagtcgaagcccgcgccggccagcagttcggcgctgtagctgctgcacagtccaagccacaggccgatttgcggacggcccgcttttaaggcgtctttaaaggcgttattcatggtgtttctcctagacaaaccggcagctgatggcgcccatgttgccgtagtcgacgtggaaggtatcgcccttgcgcgccgggaccgggcgggtgaaggagccgccgaggataatctgcccggcttcgagctggacatcgtacggcgccagcttgttggccagccaggccacgccgttggccggatgattgagtacgcccgcggcgacgccggtctcttcaattacgccgttgcgatacagcagggcggagatccagcgcaggtcgagctcgtccggtttaatcggccggccgccgaggatcaccccggcgttggcggcgttgtcggagatggtgtcgaacactttgcgcggacgctgggtttccgggtcgatgttgtggcagcgcgcgtcgataagctccagcgccgggataacgtagtcggtggcgttgtagacatcaaacagcgtacagttcgggccgcgcagcggtttggccagcacgaaggccagctcgacttcgatacgcggaacgataaagcggtcggtgggaatatcgctgccgtcgtggaagaacatatcgtcgagcagcgcgccgtagtccggctcgctgatctgcgaactggcctgcatcgctttagaggtcaggccgatcttgtggcctttgagcacgcggccttcggcgatcttcatctcgacccactcgcgctggacggcgtaggcgtcctcaatggtgatcgacggataatccagcgagatcgcgcggatctgttcacgctgcttttcggcctggttcagccgctgggcaatcagggtacgggtctgtttatcgagcatagagattcctgtggcattgcattgccggatggcgcttcgcttatccggcctacaaattcatggccgttgtaggcccggtaagcgcagcgccaccgggcaatttgcacattatttaaataacgcgtgcacgttgttttgtttgtagttcagcgtcgggtcgagctcttccatggcgaacgacagcgccagatagcggctctccattagcgtcgcgaagtgggatttgatcagcgcgaacagcatatctcccacgtcctgacggctctccaggctgcgcccggcgccgatcttcagggtcatatgcacgaaggcgtaatcctgcctgccgtcggccatctgccaggtatccagccagtgggcgcggctgcggatcccgccgatcggaaagatgccggtggcggccagcgcctcgttgactttggcgaacagcccaggcagatcggcctgctcgcggatgttgtcggtacattcggcgataaaatgcggcatggggcccccttacgcctgcgctggcaacgggaacacggcgttaacctggccggtaccggagctggcgaatagctcggtgataaactccaccttgccgtcgtatttatcccaacccagcaggccgagcagcatcaccgtgtcgtgcatgttgccttcgccgtagcagtagtcggcgtactccggcagcatggtgcagaactctttgaatttgccctcgcgccacagcttcaccacgcgctcatccatctgatgatcaaactcgcgggtgtagctgttcatcccctcttcggcgcgctggtcatcgataaagcggtgcgacagcgaaccgctggccagcaccgccacagtgccgtcatatttgtcgatggccttgaggatggcctcgcccagcttgcggctatcggcaaaatcgtgaacggtacagaaggcggaaatggacaccactttgaaatgcttatcgctgttcatgtagcgcatcggcaccagggtgccgtactccagcttcaggctgggaatattgtgcgctttggcacgcaccccgagcttcaccgcctcgtcggcgataagctggcccagctccgggttgccgtcgtagtcgtaggtcatgtcgcgaatgaaatgcggcagttcgttactggtgtagacgccctgaaaatggtcggcgcagttgatgtggtaggcgctgttgaccagccagtgggtatcaaacacgataatggtatcgacgcccatttcacggcagcgcttgccaatttctttatgcccgtcgatcgcgccctgacggcagccgtggtttttccccggcagctcagacagatacatcgacggcacgtgagtgatttttgctgctaacgctaacttacccatatcagactccccatttcgggatcggatggtcgcccatcgagatgcagacgtttttcatttcggcgaacacttcaaagctgtactcgccgccttcgcggccggtgccggaggccttcacgccgccgaacggctgacgcaggtcgcgcacgttctgggtgttgacgaacaccatcccggcttcaataccgcgcgccagacgcagcactttgctgacgtcctgggtccagatatacgacgccaggccgtattccacatcgttcgccaggcgcagcccttccgcttcgtctttgaacggcagcaggcaggcgaccgggccaaaaatctcttcctgggcgacgcgcatacggttgtcgacatccgccagcaccgtcgggcgcaggaagttgccggctttcagatgcgccggcaggtcggacggtttatccgcgccgccggccagcagggtggccccctcttcgatgccgaggcgaatgtagccggacactttctcccagtgttgctggctaatcagcgcgccgacctgggtgttcggatcggtcggatcgcctacgcgcaggcgattggcgcgctcggcgaagcgtttaacgaactcggggtagatactctgctgaataaagatgcgcgagccggcggtgcagcgttcgccgttgatcgagaagatggtgaacagcgcggcgtcaagcgcgcgctcgatatcggcatcttcaaaaatcagcaccggcgattttccgcccagctccatggagtactttttcagaccggcgtttttcatgatgttgcggccggtggcggtgccgccggtgaaggagacggcgcgcacatcatgatggcgcaccagcgcgtcgccggcggtggcgccgtagccctgcaccacattgagtacgccagccgggatcccggcttccagcgccagctcgcccagacgatcggcggtcagcggcgacagttcggacattttcagcaccgcggtattccccagcgccaggcacggcgccaccttccaggtggcggtcataaacggcacgttccacggcgacaccagcgcgcagacgccaaccggctgcacgagggtgtagttcagcatcttgtcgtcgaccggataggtcttgccgttcatctgctggcatacttcggcgaaaaattcgaaattgtgtgaggcgcgcgggatcaacacgtttttggtctggtggatcggcaggccggtatcggcggtttccatcgccgcgatctccgggacgttctgatcgatcagatcccccaggcggcgcatcaggcgcgcgcgctctttcatcggcaggttagcccacttcgggaaggcctctttcgccgccgccaccgcctggtttatttcggcttcaccgccggaggcgacttccgccagtacctcgccggtggccgggttggtggtatgaaaatagtctgcgccggcaacgtttttaccgttgatccaatggttaatctttttcatgacagtgtctcctcatacgcttgctggctgatgatatggttgaccaggcggcccacgccctcgacttcaacgatcacctcgtcgcccggtaccacgtcggatagccctttcggcgtgccggtggcgatcatgtcgcccggttgcagggtcataaattcgcttaaataagcgatgagaaacgggatgctgaagatcagatcggcggtggtgccctgctggcgcagttcgccgttgacccaggtgcgtagggccagattatgcggatccgggatcgcctctttggcgacgatccacgggccgatcggcgtcagggtgtcgcggcttttcacccgcaggttcgggcggtagtagttttccagatagtcgcggatcgcgtagtcattgcacagggtatagccggtgacataatccatagcctcggcttcgctgacgcggcgcgcggttttcccaatcaccaccaccagttcggcttcgtagtgcatgtattcgacgttatccgggcgtaccgactgctgctggtggccagtaaaggtgttcggcgctttgatgaataccaacggctcggttggcggtttaaattccagctcgctggcgtggtcggcgtagttgagccccagcgcgaacagcgtgccgtcggcgggcggcagccagcggaattcgccttctttcaataccgtgccatcgtccaggcgcacctggtcgcgttcatcgaccagcacgtcgcgtacctgtccctgccattcaatgcgtgcctgtttcatgccagctctccttctgcgacaaccgggttttcgagcgccgggaaaccgtcggcgagaatacgtacccggtcgccggggcgcagcgtgacgcgggagtggggcgtgccgataaggatcgcgtcgccgggattgagggtggcgaactcgctcaaggcgctcagcagctgcgcggcattacgctgcagatcgccggtatgccagctatccgcctcgcggccgttaatttcggtgatgatggtcagatcgtcgacgttgcgtaccgccgatagtgtgccgatggggcagaagccatcgcggcacttggctttgatcgccgggcgataaaaactctcttccggcagactcacatcgttagccagcgcgtagccagcgatatagttcgccgcctcttccgccgccactttacgcgcggttttgccgacaatcagcgccaccgttgcgccgctttgtacggtctcgccctgcggatacgggatcgcttcgccatcgccaattacggtattacgcggcttgataaaccagaccgcggttttcggcggcgtcttgtagggggcctgttgaaacgcctcgcgccaggcgtcgagctggctgcgatgattgagcgcaacggcgaagatggtacctttcattcaccactcctctgggacagatttcggttcaaagggatttcgttaatatattaatgatcatcttttatgctttgcgctgaggtttagcaactggaagtgaatgttttgtgatcggattaacacaatatttacacatcaataacttattgctttttaatcaatgagttgactgtttttcaggaaggggctggtacttttcaggtgcagaaaccggttgtacatggcaggattaaagctaattattaagttgttaataagttttggatgaggctgtagaggggatactatgcatgattcattaaccattgccttgttgcaggcgcgtgaggcggcgatggcctactttcggccgatcgtcaaacggcacaatctcaccgaacagcagtggcggatcgtgcgaattctcgccgaacgtccatcgatggactttcacgatctggcctttcgcgcctgtatcctgcgccccagcctgaccggtattttgacgcgcatggagcgggatgggctggtgctgcgcttaaagccagttaacgatcagcgcaagctgtacgtctcgctgacgcctgccggaactgcgctgtacgaaagcgcccaggcggaggtggaagaaacctatcgcctgctggaggcccagttcaccacggaaaagctgcagcaactgacctccctgctggaggagtttattgcgcttggcgtccctgccgggcgcggtgatgaagaagagtagcggttacggctcggcgctcagcctggcgagggcaataagcgtttccgcgcgggcgggggacagcggctctctcggttgcggcagcggccagcaatacagccagcgggcgctggcggcgcaggtgcgcccctgacaggtgcccataccgcagcgctgggtcagtttggcctgcagccagtcgtcggcggcagccacgtcgccgcagcgcacatcctcgcagcggcacagcaggctctccggcgtcgccgcgtttttcaaagattccgccagccggaaggcgcggtttatggcgtcggcgaagtgctgccagcgccgggagcggcgcttgctcaatgatattcgtcacgtcgcctccggcctggttcatcgtatccgccaccgcctgcaggccgcccgcgctgcagcagaggatcagtttctgccagtaaaccacgccgccgccgtcggcggtttcaaacagcacgctgtgcgcggaggggcgggcaatcagccgcgcgccgttcacctcccggatggcggcgatgtcgttggggatttactactggggcgcgcgcagctgcctgccgcaggctaactttagcggagacgaagaagagtaaaggagaacagtatggagtcggtaactctatcgttacctgaagcttatgacctggcgctggaggtactcagcgccaatggatttagcgccgaccacgcggcggcgattgcccgcaatgtgaccgccggggagcgcgacggctgcgcttcccacggcctgtggcggctgttgggcattgtcgataccctgcgcaaaggtaaggtatcgcccgatgccgagccgcagatccatgaccaggcgccggggattgcgcgggcggacgccgggggcgctttttcactgctggcctacgagcgcgcgctgccgctgctgctggagaaggcgcgccacaatggcattgcggcgctggcaattaatcgctgcgttcatttttccgcgctgtttgccgatattgagccgttgaccgaggcagggctggtagggctagcctgtacgccaagccacgcctgggtcgccccggcgggcggcacacgtccgctgttcggcaccaaccccatcgccttcggctggccgcggcaggataagccgccatttattgttgatatggcgaccagcgctgcggcgcgcggcgagatccagctgcatcagcgcagcggcaaagcgctaccggaaggctggggaatcgacagtcagggacagccaacgaccgatgccgcagaggtgctgaacggcgcgatgttgactttcggcggccataagggctcggcgctggcggcaatggttgagctgttggccgggccgcttatcggcgatatgaccagcgccgaatcgctggcgtgggataacggcgcgggcggtctcccctacggcggcgagctgattctggcgctggatccgcagcgttttctcggcgcgcaggcaccagagcagctggcgcgcgccgaaacgctgttcatgggtatgcaggaacaaggggcgcgtctaccgggcgagcggcgttttgcctgccgccagcagagtgaacggcagggggtcattatcagtcgttcattgcatgatgagatttgcgccttgcgccagggcgggtaaggcgcgaagcgccgctacccgatacatcccccggctcgcgctacgcttagccgggctaccgaacgtcgcgggttgtgtagcccgggtaaggcgcgaagcgccgctatccggatgcctgtcaaaacagcgtgtcgagctcgtccagcacattgtagtcgtcatcgaccagcagcaacgtcttccacttatcaaaggtcagacacgggtgcgaggtgccgaacagcagaatatcgccgacctgcacatcgctgcccggcgccaggcgcagcatacaatgctgatccatgatgccggtgctgacgatcgactccgcgcgcagcgctaactcctggccattacgataatgggcgatcggttgcggcagcccggcgtcgaaagcgcagtcgcgcttgccgaaattcactaccgcgcgatccgcctccggcaccgattgcaccatcgccatcagctccagcgctgaagtgagatcgccggcgagatcgcaggcaatcggatcgcgggcgatcagctcttgttgtgcgagatcgtagatcccgcgatcgtgggtgatataacagccagggcgaataacgatacggcagcggcgtggttttgccgccgccagccagatattgcacaccacgtcataccagacggtgcccgcgccggtgagaataaattcgccgtcaaccagcggctccatgcggcaggcaagcgccgcggcctgctgtagcagcgcttccacctgcggctgcggatcgtcgccgtgcagcaccccttcatacaattccagtccgcgtagccgtagccccggcaggtcgcttacccgctgcgccagcgccagcgcgtcatcaacgctacgacagccgcagcgcccgccaggcacgccaagttcaatcagtacatccagcgtttgtccctggtctgcgaagaatgcggagagggcgcgcacgttgacctcgctatcgacgcagcagataaaatccaccgcccgatagtgggcttttagctgcgcgaccacctgcatattggctttgccgaccagctgattaaccatcaggacgcgttggatgccgctggccattgccgcgctagcctgccaggcgctgcccacgccgatcccccacgcccccgctcgctgctgcgcctgaaatatccatggcgtcattgtcgttttaccatgcggtgccagcgatacgccgcgggcgtcggcgtagcgctgcatccatgaaatattattttccagcgccgacttttttagcagcgcggcgggtagacagacctcttccgccagcagattagccggcgcggacatgagggcggatttgtgcgggatgagcggtgctgaatggtatttcataacactatcctttcagggtttataatcggttagtcgctgggtatcatttataactatttgataaatatatttttaatataaaaatgttattatttttgaataaaagtatcacaaagcgatctgagttttgcgtagttttccactgttttttgcgcttgtaaatggttaacttatcggcatgtcgaaagggagtaattgctatgaaagttgactggcttttcaaaaacgtcacggtgatcgacgggagcggcgggccgcaataccgtgctgatgtggcggtgaagggcgatcgaattatggctatcgccccggcgctggacgttgcggcggagcaggtgattgatggccaggggcgggtactggcgccgggctttattgatgtgcatacccatgatgatatcaacgtgatccgcatgccggagtacttgccgaagctcagccagggggtgacgacggtgatcgtcggcaactgcgggatcagtgcggcgaccgccaccatgcggggggaagtgccggacccaatgaatctcctcggcgagcagcaacactttatctatcccaccgtggaggcttatgcccatgcggtggaggcggcgcgaccgtcgctgaacgtcggcacgttaatcggtcacaccgcgctgcgcaataaccatatggacgatctgtttcgtccggcgaacgagacggaaatcgccggcatgcgcgtacagctacgcgatgcgctgcgccagggagcattagggctcagtaccgggctggcctacgccagcgccttccagtcgaccaccgaggaggtgatggcgctggcggaagagctggcggccgggaagggcgtctataccacccatttacgttcagagtttgagccgattctcgaggcgctggacgaagccttccgtattggccgtcacggcaacgtgccggtggtggtttcgcaccacaagtgcgccggggcaaaaaactgggggcgtaccaaagagacgctggcgtttttcgatgagatgcgccagcagcaggatatcgcctgcgactgttatccctattcagccagctcatcgacgctggatatgaaacaggtgaccgacgagtttgatatcgtgattacctggtccgaagcgcagccggagcaggcggggaaaacgctgcagcagatcgctgatgagtggcaggtgagcctgcacgacgccgcggcgcggctgatgccggcgggcgctatttatcacaacatggatgagcaggacgtacggcgggtgatgcgctatccggtcaccatgattggctctgacgggctgccgaacgatccgatgccgcatccgcgcctgtggggcgccttcccgcgggtgctcggccactatagccgcgacgagcagctattcccgctgactaccgcggtacacaagatgaccgggctgtcggcggcgcgcttccagctggcggatcgcgggctggtgaaaattggctactttgccgacctggtgctgtttgacccgcagacggtgcgcgatgtcgccagtttctccgacccgaaacgaccggcggacggcattgaggcggtgatggtcaacggcgtgatgagctacggcagtgataagaaaattaccggacgggcagggcgtttcctgcgtcgtcggatggactaaggagttgagtatgagtatcaagcgttatggcgtagaaggtggtaccggtaccggcgggcagcacctgccgttcgcgcgggcggtggaagcgggaggctggctgtacgtttccggccagacgccgatgaaaaatggcgaagtcgtggaaggcgggattgtcgaccagtcgcgtctggcgattcagaactgcgtagatatcatgaccgaagcgggctacaccctggccgacgtggtgcatgttaaagtgatcctcaccgatgcgcgctattttcagtcgttcaataaggtatttcgcgagttctttggcgacaacccgcctgcccgcatctgctgcgtagcggacctggtggtggattgtaaagtcgaagtggatgtgacctgttttaacgcttctcgcgcataaaaagttagtaaccagaaatataaacagtcattttgagcgctgaaataattcagcgcttcgtagccttttaccttttcaaaattaactggcaggatgtgaattatgaatagtcatgtctttttagtcggctttattatttatgcgttagccatgatttggcttggctggtacgtgtcgcgtcatcaaaaaagcggtgaggattttttactcggtggccgttctttgccgctgttcctgacgctggggtccaccgtggcgaccatggtgggaaccggttcaagcatgggcgctgtcgggttcggctacagcaatggatgggccgggatgctttacggcgtgggcggcgccatcggtattttactggtggcctggctgtttgcgccggtgcgaaagctgcgctttatgaccatgagcgaagagctttcttattacacagggggcagccatttaattaaaaatctcgtcgggataatgatatttattgcctcaattggctggctgggggcacatattcttggcgggagtatgtatttagcctgggcgacaggaattaatctgacggtggcaaaaattattattgccatggcgtttgcgatttacgtcattatcggcggttattctgctgttgtgtggacggacaccattcaggcattaattctgtttttcggttttatcctgatggcgattctggcggtggttcacgtcggagggtgggatgccatcgttaaggcgatggatccaaaggcgatgagcctgtttgcggtcgataagttggggactattccggcgctatcgctggcgatggtcatcggcgtcggcgtgctggcaaccccttcctatcgccagcgtatttactcgggaaaagacgtctcttcggtgcggcgctcgtttgtctataccggtgtgctgtatctgtttttctcggtgctgccggcggttatcggcatggcggcctggacgatgaaccccaatcttgagaacagtaactacgccttcctgttcgccaccagcttcttaccggcgatcctggggctggtggtcctgattgccggactttccgccaccatgtcttcggccagctccgatgcgatagccgccgtggccatcatgatgcgggatgtctataccctcgttaccggaaaaatgccgccggcgcataaggcgataacgctctctcgctggatgctggcgttcgttatcggcctggcgatgatcttcgccctgacctcgaacgatatcatcagctatatcaccaaaatgatctccatgctgatgtccgggctcttcgtctgttccattctcggccgcttctggctgcgctttaactggcagggcgcgctaaccgcgctgctgagcggcatgctggtgtctattgtggttctggttaaggccgactggctggcttactggggcaatccgtgcattccgtcggttgttggcagctttgtttccgctatttttgttaccgtcatgacgccagccagcaaaatcagccgtcagcaggcgctggaaatgattacccaggagcgggaaggggaggcgatcccggcgaagacggtagtgcaggtctcaggagaaacgcaatgaaggattatattgccgtcgactggggctctacccagctgcgcggctggctgattcgcaacggccagtgcgtcgaaacgaagcagctgccgatgggtattacccgcctgaacggacgatcgcctgctgatgtattcgcggagcatttggccccctggcgcggcgcacaggcactgccggtgctgatggccgggatgatcggcagcgacgcgggctggcaagcggtgccgtatctggactgtccgacggcgatcgacgcgcctgggcggcagctatgcgccgttgctgaaggcgtgtggattatacccggcctcaagattgaacaggacggggatttcaacgtgatgcgcggcgaagagacgcagctgctgggcgcctggcaactgatgcccgcggagtgttacgtgatgccgggtacccactgcaaatgggtacaggtggtaggcggcggggtgcgtcattttgccacggcgatgaccggcgaactgcatcatctgctgatgacgcaatcgctgatcggcaaagggctgcctgcccagcagccggacgatgcggcgtttgaacgggggctggaaaaaggtctggcgcagccgtcgctgattagcgaactgtttgtcgccagggccgcccgggtgctgggaggtctggcggcgagctcagtcagcgattacctctccgggctgttgattggcgcggaggtggcgaccctggggcagcgtttctgtacttctgccgtcacgctggttggcgaaccggcgctgaatgcccgctacggtcgggcgatgaaggcgcgcggaatgatggttaacagctgcagtgccgatgaggcattgctggctggcatggcgaggataatgcatgaacaagattaagctggtggcgattttacgcggtattcaacccgctgaggcggcagatcatattgagacgctaataaatgcaggctttcgctatatcgaaatcccgctcaattcgccggactggcagcaaagtattccggcgatggtgcgtcagtttggcgagcgggcgatgattggcgcgggaacggtgctgaaggttgaacaggttgattttctcgctgaagccggggcgaaacttatcgtgacgcccaatacggccccggcggtgatccgccgcgcggtagataaggggatgctggtgtgcgccggctgcgcgacggcctccgaggcgtttagcgcactggatgccggggcgcaatggctgaaaatctttccgtcatcagcattcggcgcggactatattcgcgcgctgaaagcggtgttgccgccggaggttccggtgctggcggtcggcggcgtgacgccggaaagtctggcgacctggatacaggcggggtgcgccggtgccggtctgggcagcgatctttatcgcgccggacaggccgtggaacgtacccgcgagcaggcggagaggtttatctccgccagtaaaagttagtcccccagcggctgccgatcgacgccgccgcggtggctgtcgagcgccagcttaatacggcgtaatttgccttttgcctggggtttgttggccatcgccagttcggtggccagcacatcgaccatcgccagcatcgcgtaacgggaagtgctgggcttaaagatatagtcgttttcccgtaccagcagcggtagcaccagatccgcctgttcagccagcggcgttccggcgggggtaatcgcaataaccttcgcgccgtactggctggcaatcgccgcgctctcgatgatttcccgggtatagccgcccagagacagcacgatcaccacatcctgcggcgtcaccgccgagctcatcatgcgtaccagcagaccatcgctctggctgactaccggcagaccgaggcgaaacaggcgatactgaatttcctgagcgcagatggtcgaaccgccgcccatccccagggcgaggatctgccgcgcatcgctcagccagctcaccgcgcgcttcagcgcctcgatatccagcgcccgccggttggtctccagtacgctgatgattgactcatagatcccctggacgccttcgagatccggaacatcgaggataaaccgctggccgaccgcaagagattgcgcaagcttcatcttcagctcgcggacgtctttacagccgagcgcccgggcaaaacgggtgaccgaagcctggctggtttgcgtcagacgcgctatctcggcgatgggcagctccgccgccgccgcgacatcatcgagaataaactgcgcaatgcgtttttcggtcgccgtgagttccacaaagcgatcggttatgcaggaaataatatcgattgaccaggacatacggtaacaacgggtaagttttgaatggtactttgtaccatattgcgccgctgaaatcagtgctgaagtctacaacgccaggcgcatggcgcagcgcgactcgggcggcaggccgtgccgggtctcctgttccctttttgccgccagcccggcgggcagggtcagctcatcgagcatggcgaatcccagacgggtataaaacggcgcattccacggcacctcgcggaaggtggtgagggttaccgccgggtagcccatctgccgtgcgctctcaataacccgctccagcagcatccggccgatgccctgttgctgccaggcctggtggacggcgacttcgacgataaataacgcatcgtcgagcggttcggtcagaataaagccaacgggttgcccggcggctaccgccagcaggctatgctccgtttccagataatcatgatggcgcgcaacgctaatcacctcgctatccgccagccaggcgagagaagggatctggcgaaatgcctgggcggcagaacgttcaatggcgggcagaagggcgatatcgctctcctgagtcaggcgtaatacggcaccggcagttatagtgttagttttcatcacctcagcatagcagccttcgggagaaaagtatggagctgaccgccgttcccgccacgcagttctgcagcgtgcagttaacggatattctcaacgcctgttttgaagcctacctggtgcctgttacccagtcggtagagggatttgttcagcgttttagcgccgaggggatgagcctggtcgattcccgcgtctggctggccggagatgaaccggcggcgatcgcgatcgtcgcgcgccgggggagtgccgctcgcctggcggcctttgccctgcgcccggcctggcgcggcaaaggcctgggccggaaactgatgcaggagctgctgatgcttttgcaacagcaggggatcgagacggtagtcctggaggtgatccgcgataaccatgcggccgtcgcgctgtatcagtcgctgggctttacgcgacgctatgggctctgcggctacctgagtacagaacttctgcccccggtgccgggcgtattgcagctttatcccaccctgtccctgcttcggcgcgccattgaggagagtaacagccagcttccctggctgctggatccgcttaccttcgccactctgccatgtcaggtcgtgacgctggaacagcgcgccttcgcggttctaacgacggcgggctcgcgccctgtactgtcgtttttgtgggtggagcccgccgcccgccgccaggggctggcgcgtgagctgctgatggcgctggcgcagcagttcccgggcattggtacttcggtgacggtcccggaaacttttacgccgctgtttgccgcggccggctatacgccgctctcgctgcagcagtatgaaatgacgatggatctggccgacgcgaagtcggcttagccaggagtgtgcgctggaccgcaaaaaaacagcacgggccgtcgataagcctctcttttcccgcatcatatcccttcgtaatggcgaagagggggatgcgatgcgtaaaacggaactgttggcttttttgcaaaatcagaccgattttttcgatccggataacctgagcgaggtctttaccgccagctggctggcccggcgtttcgcgatgcaaagaaataccgccagccattatctcaatcagctggtcgctcaggacgtgctggtgaaaatcaacacccggccggtctattttctgcataaaaaagccttttgccagcagttctacccgctttcccgcagtgagtatgccagcatggcggagttactcgcggagagcgaccgccagccggagcaggcggaccatttttcgttgctgaccgggcatgacggcagcctgcgtaaaccgattgagcagatgaaaaccgcgctgttttatcctaacggcgggctaccgctgcttattaccggcgacagcgggaccggcaaaagctatatggctgagctgatgcatgagttcgccatcgcccaggagctgctggcgcccgatgccccctttgtgagctttaactgcgcgcagtatgcgagtaatccggagctgctggccgccaacctgtttggctacgtcaaaggcgcgtttaccggtgcgcagagcgataaagcgggggcgtttgaggcggcaaacggcgggatgctgtttctcgatgaggtccatcgcctggatgctcaggggcaggagaagctgttcacctggctggatcgtaaggagatctaccgggtgggggagaccgcgcaaggcttgccgatttcgctgcggttggtgtttgccaccaccgaagatattcacagcacttttctcaccaccttcctgcgccgaattccgatcctggttagcttgcccgatcttcaacaccgtagccgcgaggagaaggaggcgctaacgctacagtttttctggcaggaggcgcgcacgcttgccgcccggctgcaactaacgccgcgactgttgcaggtcctgacgcagtatgtttatcggggcaacgtcggcgagctgaagaatgtggtgaaatacgccgtggcgtcagcctgggccaggtctccgggccgcgaaatgttgaccgtgacgctgcacgatctgccggaaaatgtcatggccgcgacgccagcgctcagcgaagcgatgggccagcaggagccgctgcttatcgagccgcagaccagcctggtctggctgctgcgcgcgcgcgacccggtacaggggctgatctatgacgttcagtgtcgggttctggcgcagtatgaagcggtgctgaataaaaaaacggtctgggaagaggcgcaaaggagcatgggggaagagattgaaaccctcttcgatcggctgatctttgataatcatgactccagtagctcgcagatgctgctgctgatcgctcatcaggttcgggaggagtattatcgcctggaaaagcgcttcaatatccagtttaacggcaactgcctctacgcgctgagccactacctgatccaccgatcccgacaggcgcagtccacgataaacaatgaaaaagcccgccagctggaggacttcctggtacagaagtttccgctgctgtatcgcttttgcgaagcgatcctcggtgcgttgacgctgaagctggatattgaaccccagcgtatcgacctgctgctgttagtgctgtggttccacaagaatggcgccatcagccagcagcaggtgacccgggcgataattctcgctcacggttacgctaccgccagcagcatcgccaacgtggcaaaccgcttgctgaaaagccagctctttgagtcattcgatatgccgctggacgtgacgccggaggctatcgctaaccaggtgatggcctacatagagagccatgctctggcatcaggattgataatcctggtcgacatgggatcgctgaacgccattcaccgccattttaatcgtcgcctgagtacgccgatggcgatcatcaacaatgtctccaccggtatggcgatgtacgtcggggagcgcattttgcagggcgttatgctggaagatatcgtccgcgagatcggcgatgaccttgcggttgagcaccagctctattacccgcaaaccgataagccgcgggcgattttaaccacctgcgcgaccggtctgggcgcggcggcgaatctgtcggcgctgttaaaagccagcattcctgaagcgcttggcattgatattgtggcctgcgatgtggagacccttgccgatcccgcgcgacgggagccgatgctaagccgctatgaggtgctggcgatcgtcggcaccctggatccgcatcttgccgatctaccctggatctcgctggattcgctgatctctggcgaagggagtcgtccgctgatgcgcatttttggcgaactggcgacggcggaacaggtcagcgagatcaacaacctgatcctgaaaaacttttcgctgcgccgggtgatcgagtcggtgacgatcctcgatacggctaaggtgatcaaccaggttgagcagtttttgctgcgctatgagcatctggccgggcgcgatgtacctaacgatcgtaaggtcgcgctgtatgtgcatatcagctgtctgatagagcgattaattcgtcacgcttccccagcccaatacactggagggcagtgtccggatcgcgagctggctacgctacgcgaggcctttagtgtcatagagagcgggtatagtgtcaaaattcccgttgtagagctctgctacattcacgatatcctgacgcgggaaacggaatttattcaggaagatcaagacttttaacacatctcttcttttttatccttacgttagccgacgcgccactgtttctggcacgtcggttgcaattaagaaagcagtggaatgcgctttcgaggtaaggatgaaacgacactatatttttgccagccatggcagctttgctaacggtttgttgaactccgtggaactgatcctcggtaaacaacccgatatacataccttgtgtgcctacgtggaagaagaggtcgatctgacgcagcaggtggaagcgctagtggcgcgtttcccggcgcaggatgagctgatcgtaattacggatatttttgccggtagcgtgaataacgagtttgttcgttttttatctcgcccacatttccatttattatccggtttaaatctgccgttaattattgacttgctgatttccgcagcggaagacaataccgaaaaattaattaccgaggcattaacaaacgccaaagagagcattcagtactgcaatcaaacgattgccagcgcgatgactatggataaagacttctgaaatgaggaagcatgatgattacgttattaagggtagaccatcgattacttcacggccaggtggccttttcctggacccaatatgtcggcgccgattgtattttaatcgccaacgatagcgtccctggcgatgagctgcggaaaaccaccattaagcttgccaaaccgccctcggtgaagctggtgattaaaaatataaatgattctattgaggcaataaaaagcggggttaccgataaatataatttatttattgttgtggagtcggttaatgacgcctggcgtattgccagcgccatcgacgaaataaaaagcataaatcttggcggaataaaggctaaagagggcagtaaaaatatctctaaggcgattaatttactgccgacagaaatagaacagctacaacaactggtgggcaagggcgtcgaagtggagattcgccaggtcccgaacgatcgcaaacagctttttgcggaatgcgtgtaattccggaggacagattatggtagaggctctcttactgggtctggtggcgtttatcgcgcaatcggaatatgccttagggacgtcgctaatttcacggcctatcgtcaccgggctgctgaccgggctggtgctgggggatgtacagaccggcgtcattatgggcgcgacgctggagctggcgtttatcggctctttctccgttggcgcctcgatcccgcccgacgtggtgaccggcggtattctcggcgtggcgttcgccattacctctggcgcaggcacagaaacggcgttgctgcttggcctgcctatcgccacgctgactttgatcctgaaaaatatctatctggggatgttcattccaatgcttagccagagggcggacgggtatgcggaacgggcggatctccgcggcattgagcggatgcatttgattgccggattcggcctgtcgctgatgcttgccgcggtggtcaccgtctcattcctggtgggcagcaacgcggtgaaatccctgctcgatacgatcccggaattcatcaaacatgggctcagcgtcgccaccggcatcatcccggccctcggcttcgcgatgctcgccaggctgctgattaacaagaaagtggcgccgtattttttcctcggttttgtgctgatggcctatttgaaaatcccggtgaccggtatcgccattctcggcgccatcgtggcggtggtcatggttaacgtcaccgcattgaattcacctcgtatcacgacagaacaaggagtcagcgatgacgacgaagatgatttctgaagagaccctgcagccgcaggcgcaggaagaaacccggattacgccgcgcgatttacgccgggtgttctggcgctctttccagatggagttctcgtggaactatgagcggcagatgaatctcgcctttgtttacgcgttgatcccggtgctgaagaagctctatccgcgcagagaggagctggccgcagcgctgaagcggcatctggtttttttcaataccacgccgcatatcgtcaccctgctgctggggatcaccacggcgatggaagagaaaaacagtcagcagaaaaacatggatgccactgcgattgataacgtcaaagcctcactgatgggaccgttagccgggctgggtgactctttcttttgggggacgctgcgcctcatcgccaccgggatcggcaccagcctggcgctgaagggcaacatcctcgggccgatcctgtttctgctggtatttaacgtgccgcacattctggtgcgctggtgttttacccgctggggctacgtactgggcaccggggtcctgcagcggatccagaagagcggaatgatggagagcctgacctacggggcgtcgattatcggtctgatggtagtcggggcgatgaccgcttcaatgatcgatatcaccattcctctctccttcggcgccggggaggccaaaacccaggtacaagacattatcaacgacattctgccctgcatgctgccgttggtgagttttggcatcgtctactggctactgggacggaaagttaaaccgctctcaattattggcggcatggcgctggtgggcattctgggttcgtggatcggattgttttaacgggagtgagctatgcgaccaacaatgatgacatatatcagtgaagagcctgcctgcctggcgcagatcctgcgcgagtaccggcaaaagctggcgccgattgaaaccttcgcccgccagcacccggtacggcggatattattgctcgcgaccggatcgtcgctgaatgccgcgctgtgcgcgcgctatttctttgagcaacgcttcggtgtgctgcttgacattaaagagccgtacaacttcacccattacgacgcgatcgacccgcatgccgatctggtggtggcgatttcacagagcggaaaaagcgcgtcgacgctggaggcgatgcgtaaggtacaggcttccggcaagtcggttttcgccctgacctcagatccgcaaagcccgataggaggcgccagcgatggcgttctggatattaataccgggatcgagagcgtagggtttgtgacccgcggctttagcgcgacggtgctcaacctgttgctgatagcgctgatcattgctcgtaagcaggagaaagccagcgaggtcgaggagcagcactatctcgctgaattgcagcggctggtagcggcgatcccggaggttatcgtccgcacctcgcgctttattgaccgccatagcgaaacgctgcgcagcggcgagcgctttgtcgccaccggctacggcgcgctggttggcgtggcgaaggagttcgaaaccaaatttaccgagacggtgcgcgtgccttccagcggctttgagctggaagcctatatgcatggcccctatctggaagccaatgcccgccatgtgatgctgtttattgaagatacgccggacgcgcgaacccgggcgctgcgcgactatctggcgccgtccattggccgggcctttaccctgatgctgggtgacgaagaggatgctcaaacgctggcgctaaactgtccgtgcgagcatcacctggcgcctctgctgctgattgtcccagtgcagatgctcgcctggcataccgcaggactgaaaggcatcgatctggctaaacgtattttcgacgattttgaccgcgtcttaaaaagtaaaatctgaaaattcaggagaaaactatgttgggttttaatcaggacgagtacctgaccagtgctcgcgagatcatcgctgcgcgtaaacaggctgaaaccgtagccgacgatatttatgacagcggctgtagcgcattattttttgcttcggtaggtggttccctggcgccgatgatggcaattaatgaatttgccaaagaattaaccagcgtgccggtatatcttgaacaggccgcggagttaatccatcgcggacataaaaaattaaataaagatgcggttgtcgttacgttatctaaatccggcgataccaaagagtcggtcgccattgccgaatggtgcaaggcacaggggatccgcgtggtggctattactcgtcacgccgactcgccattggctgccgccgccagctggcatattccgatgtgccacaaaaatggcgtggaatatgaatatatgctgctgtactggttattcttccgcgtcatttttcgtcacggcgagtttgctgattatgcgcgatttgccagccagctcgagctactgccggaaaatctcctgcaggcgaaacgccagttcgatccccgagcggatagcattgccgcgcaataccatgactgcgactatatgatgtggattggcggcgcggaaatgtggggcgaggtctatctgttctcaatgtgtattctcgaagagatgcagtggaagcggacgaagtcggtgagctccgctgaatttttccacggcaccctggagctgctggaaaaagaggttccgctgtttctggtgaaaggcgaggggagatgccgggcgctggacgaacgcgtcgagcgttttgccgaaaaaataactgaccatctggtggttatcgacccgcgcgactatccgctgaacggcattgatgacgcgttccgctggattatggcgccgtgcgtggtgtccaccctgctggtggaccggctggcggcccactttgaacaccataccggccacgacctcaatatccgccgttactaccggcagtttgattactaagccgtgttgatggcggccagccgggctggccgccatgctattctccgaggcgcttcccagaaaattgtcgtcaaacccaaccgggtaaaaaccggtgatagagtccggcttaccttctctttcaggcaagcggatggccatgaaaaaacggatgacctcgacgccgcacgatgcggtctttaagcgatttcttcgtcacccggagacagcgactgatttcctcactctctaccttcccgaagcgatccgtcagcggtgcgatttctctaccctgaggctgcaatcggcgagctttatcgatgaggatctgcgcgcctggtattcagatgtcctctggtcggtgcagaccacctgcggcacggggtatgtttacgtggtgatagagcaccagagctcaccggatagccatatggcctttcgcctgatgcgctatgcgattgccgcaatgcagcgccacctggatgccgggcacaaaacgctgccgctggtggtgccgatgcttttttatcacggtgcaaccagtccgtatcctttttccctcaactggctggatgaatttgccgacccgcagctggcgacgacgctgtatggctgtccgtttccattgatcgacgtgacggtgatgccggacgatgacatcgtgcaacatcggcgagtcgccttgctggagctgatgcaaaaacatattcgccagcgcgatctcagcggcataacggagtcgttggcggccgttgtgatgctgggatacactaaccgtcggcagttgagaatgctgtttcactatatgctgcagtacggtaatacggccgagccgggcgtgtttctccgccggctggcccgccgtctgccacagtatgaggagacattgatgtctatcgcgcaaaagcttaagcaggaaggtcggcaacaaggccgactggaaggccgggaagaagggcacctggagggcttgcaagaaggcagccgacgcgaggcgctgcgcattgccggcagtatgttacagaatggcctcgacaaagagatggtacagaagatcaccggactgtcggctgatgaactacagccgctgtgtggttaacgtcctgccacgacaaccgctgcccggcgcgaaaattcgccgggcaggattgcgttagccttcgcttttcaccactttgatctccaccatgccgatccccaactgacgcggggagtggccgaggatattgccctcgttagtggtttgcgggtccggcggggtgatgatcagcgtgttgctgcgcgttgggttgtcaaaatgcagcgtcgtggtagtcacgtcattatccagagtgagcacttgctcactttctccaactcgcaccggaatcggcttattggcgtttgggccataagctttggcggtaatcaccagatcaaatttctccggcagcggctctttatattcaatcttcacgtcgctgcccaactgagcattggaccaccgcccccacgactcgggacgcgaaataccgctgaactgtttaacctcttccggggcgccagcgacgttaaacacgaagctgtcggccttatagcgaatatcgttgtcgacaattttcagcgtatcgacgttgcccttatagcgctccatatcgataagggtgtccctgaaggcggtcttgccgtgccactgcggcttatcaacgtgctggaccttctgctcaccccccagctgtccctgcgagacgcaccagtcggtggagagcgccagctcaggcgaccacagctggcccattttatagcagcgatcgacccacacgaaattatcccgtggcgcgaaatcggccagctggaagcgcagcggcgcagagtattcactctccggcagcggttctacgcgctggtcagatacccgcagcagcagcggcagacggaaatggctgccggagaaagcgatcatatttttctgcgagtcgatggtgaaattcttcatttctttggggaaattccacaggcggatcacgtcaggcttccatgccaggactttctctttcatattcatgaaaataccggagagcgactggccggagaggctgctacgcccgaggccgatatagttatcgccgccgagaatatccagcaccgtcgcgccgttatccatggtgttgcgtttcaccgccagggtctcctgctgcggtttatcgccgcgcaggatgaagaacagattgctgcgatcgtgcttgttgagataatcccaggcgctgttcttcatggccaggtgatcggaagagaccacgatgaccgtgtttttgaaatagggtgaggctttaatcttctctatcagcgcggcgatatgttcctgactgcagctaacggcgctgaaagagaggtttttcttgccgtccacatcatagcgtttacgctcgcaggtgcgtgagataaaaccgtcgggatggtgggtatccaccgtcagggcgaagagcgagaagcgtttcccggactgcgacagctcttcgaattttttccaggtctcgtcgagtacggtgtcgtcatagaagccccagtcgttgcggtaggtaggatccgccaccgtagtttttagctcttccgccccgtacagatgatcgaagccgtgggatttaagaaacacgtctttgccggcaaagcgcaggttagccccctgcacaaagtaattctcgtaaccggagttcttcagaatatcgccaaggcaaatattctgtggaaagaagctggagactgaggctgaggcattaccttcgaacggcgcgaacagcggaatgccgcactgtgaggcgaccatgccggcgatagtgtaatcggtccccggcagctgcatggtattgctgaaatcaatggcctcagctttaattctgccaagctcaggggtgaggttggggaaggcgtcgttatcaaaataggtgcgctcgagactttcgccatagatatagaccaggttcagctgcggattgtcgatttgcttcgacggctctttatagtacgcggcaaagtctggatcgccctcgcgtgactgggatttcaccagctcgctgatctgatggaaggccgggctggcatcaacggaggccagcgccagcagtagcgccgccaggctgtaaccgacgtgatgaggatgatgccgacggcggcgcagcacccagccgagggcgccaaagacggcgaccagtgcgacggccacgccgacccccggcagtatatatttgccgatcccggcgccggtcaggctgttggtcagagtgtagagtaccgcgtcgttgatgccgtcgccggtgaagtagtcactggcgtagagggtgatattcagcaccacgaacaggcctaacaccgtgagcgtggcggcaaaccaccaggtgttacgacccgctttccaggcatacagcaccaccgaagctaaaaataaggcgatggataacaactctgacacagctcatcctcattaatgccagttatcggctggcagaacagattacttttcaagccccactgtaattgcagcgccatcttgctgcaattctagcgtcatgaaagtgtgcagttattcagaattggtttagaagttgccttttttgatcggcatcgcatcgggcgaaatgggaaaacggaacaggaaaactgcaaaaaaaagcgtttcaggccgcggcgccgccgcgaaggcaacaaatgcggccttgtcagtcaggatcaggagaggaaattaacaccctgttttaagaccagatcgcaggctttggtttttacctgtttcgccagcgagctattgccgagcgtattcaggtccaactgctggccgtttttgctgttgagcagcccctgcaggccatccagatagctggtgtcctgtttttgtttttccggcgtgctaagccccagtttatccagcacctgatttttgacgttatcggcgctggtcacggaggccagcttctgtttcgcgcaatatgacagtatcccggccgcattattcatgctgctggcggtcagggattggctgctgccgttgagcaggctggttagcgaagagacggacatgccgccgctggcctgggcgttactgccgctgagctggctggcagcgctgttaagggaatcctgccaggaggcggcgtgggcgccagagagggtaaacgcgctaacggcaagcgcggcaacaacgctatttttaaacgatttcatagacggactcataagcgtgactgaataatcgctttagtataacgccgtcgtcgcccggaaatctcttaatactccttgcctgtaacgcggtgccggtaactttcccaattgaagataacccacaggctgttgccgagccgcatacggtccatcacccgctcgccgagcagtttgttcatctcttccatattgctgttggtgagcatcccggtaggtcgtttggaggatgagcgccggtcaactatctgattgataatgaccttttcatagcgagactccgtctgcatcccaatttcatcgatcaccagcaggtcgaccatgctgaggtcgttaagcaactgttcttcgctcgtttcccggttgccgaaggtatctttcatcgccgacataatatcggccacggtgatgattaagaccgacttcccgcgcagcagcagctcgttgcaaatggctgccgccaggtggtttttgccagtgcccggtttaccggagaagataaagctggcgatattgccatcgaactcttccacgtactggcgcgcccgggcgagcgcattcatctgcccctcgcactcgacgcgatagttatcaaaggagcagttctgatgcagcgggcggatccccgagcggttgaaggtgcgctgcattttcatcgcgcgattctctcgctccagcgcttcggaacgcagccggccttgctctttttgccaggccagcagctcttcgccggttttaaacgccggttcaatatgtgccggcatcattttctgcaggcgtttcatcaggtcgccaacgtttttcatgctcatcctcggaaacctcgcggaatatggctgtcgggttcgctaacgctgttcacatcgcgcttcggctgtccgccgttgctggcgcggctgatttgcacgctacgcgccagcttctgctgccactgcacgtggtgaaagactttaccttccgcctgccagtaagcgacgaaagcggccagctcttcgggggtaaccggctggctcagggcaatgccccacagcgcggccaggcgctgaaaatcggcgtcaggctgccatccggcgtacatagcaaatttgcccatcggcaccgcaaccggcgccgcggcgggctcctcgaaaaactgcgggtcaagcgcgatgtcgctgccggggcgcgccagcctggcttccagctccagcagttgcgccagccgcgctggcgtcagcgcatagaatgccggcgcgttattggcaaaaacggcaacggtgccgtcagtcgattttgccagcagcgccgcgtgctgctggaggaactcttccaggccgctaaaatgggaggttaaaattcgcgaagacataactctatctcaactctgaactgcaaagagtggggtgatctgcacatagtagcacagaggccatcgcggaaggagcgtcgcgggttaaccgcgacgtcggggttagacgcgaggacgcttacgatacagccacaggccgggtatcgacaggccaatcgaaagggcgcccacaatcgaagaggcctttaaaaaattgctcagcagcaaaatcatcatctcttccgaatagccaaaatgactgatttttaccgcggaaatcatcgccgtgtaggctgagatgccaggaaacatcgggatcacggcggcgacggtaaaaatcttcggatgcgccagataccagcgcgaccattgaatgccaatgctgcccaccagcagagcggcgagaaaggtggcccattcaatgttaaaaccggcgctcatcatgatcatacgcgagccatggccaatcgcccccagcagcgcgcaccagcgcagagcgcgctgagggacattaaagaccatcgcaaacccgacggcggggatcgccgccagcagcatgtcttccgccagcgcaaaaataaatgagattatgcccatccgcgcagcccccatacggtcatggccatcaccacgccaatgcaggtggctagggttagcaggctggcgatcgcccagcgggcgagtccggtattgatatgccctttaaacatatcggcgacggcattgattaatggaaaacccgggaccagcagcaggacgctggcggccatggcaatggtcggcgtgctggcaaacgccgggaggcgcagcagcagcccggagatggtggtggcgacaaaggcggtgatgcagaagttgatctgcggatgcatggagcgatgggtcagcacctggcgaatgtacatggctaccgtgctggcgcagaagctgaccagcgccccatcccaaccgccgttattcagtttgcagaaacaggcgcaggaaagacccaccatcagcaccagcagccagcgcggatagcgcaggggaacgatctgcgcaaaacgcttctcgacgtcgcgatagtccagcagcttatgctcggcgaggatcacaatgtgctgcacttccgtcaccacatgcatattaatgccgcgatcgacatttttgcgcgtagaggtaagacattcgccatttttaatggtggtcaggacgatggcattcgaagagatggcgctttcaacgctgtccatccccaacgccagcccgagacgtgttgacagttcctccaccagcgcactctcggcgccgtgctgtaacagaaaaagaccacactggatgcataaacgtgtgattgcccgctgttgtgtccgatcaacctgcatacttcctctattgttcacgacgcctggtatctgccgatactttaacctgaagcgcagtggcggctgaggggggtgggatcaaataatgtgcaaaaattcccagtctgcggggcggcagaatttgaagcatcccacacttttgccagtttggtgaaaagtgcaatttttgtcgccattcatcccttctttttccccactgacttatcaaaaatgcagaaaagcacttttattaaacaaaaattatacaaataattaaccctgcaagagtgagacatccctatgaagacacaggtcgcgattattggcgcgggcccctccgggctgctgctggggcagttgctgcacaacgccgggatccataccgtgatccttgagcgtcaaacgccgcagtatgtgctggggcgcatccgcgcgggaattctggaaagcggcaccgtcgatctgctacgcgaagcgggcgtggcgcagcggatggatgccgaaggcctggtgcatcatggggtggagtttctgtttgacggccagcgggtgcccgtcgcactgagcgagctaaccgacggtaagagcgtaatggtttatggccagaccgaagtcacccgcgatctgatggctgcccgggccgccagcggcgcgccgatcgtctatggcgtgagcgaggtggctatccatgacgccaaaagcgaccggccgacgatcacctacctcagcgaaggggaaacctgccgtctggagtgcgattttattgccggttgcgacggtttccacggcgtatcgcggcaaagtattccagctggcattttgcagacctacgagagcgtgtggccgtttggctggctaggcctgctggcggatacgccgccggtcaatccggagcttatttatgcgcaccatcagcgggggtttgtattgtgcagtcaacgctcactgactcgcagccgctattatctgcaggttccgctgagcgataaggttgaagcatggtcggacgagcgcttctggcaggaactgaaaagccgcttgccggaggagctggcatccaggttagtgactggtcactcacttgagaagagcattgcccccctgcgtagcttcgtcgtggagccgatgcaatatgggcggttgttcctggtgggggatgcggcgcatatcgttccgccaaccggggcgaaaggattaaatctggcggcatcggacgtgaactatctgtggcggattctgcgcgaatactaccatcgtggccgcagcgatctgctggcggcctactcgcaactggcgctggatcgggtctggaaaggggaacgctttagctggtttatgacccgcctgctgcatgattttccggatcagaacgcgttcgacgctaaaatgcaggccgccgaccgccgctactatctgggctcgcgcgccgggctgaccactatcgcggaaaactacgtgggcttgcccatggagcgtgtcgcctgaattaagaggagtcatcatgccgttcgttcaaaacgtgcccgtatttaagctgtatggcgaagagtgcggctggccgacgccggacctgctgcactgtgagtcgattttacagcgcagcagcctgtatcagtggcatattcgcgtccatcagcatgcggaaatggtccagcttctctatctgcatcaggggcgggcggagatcgaaattgaaggcgccaccgcggtgatgacggagtcctgcatccaggtggttcccgccctctgtattcacgggtttaatttttcacccgggacgcaagggtttgtgctctctctggcgctgccgctgctgagccggtttgaaaatcagttcggtcgccctctggatgtgcttagcgtgccgcagtgtgtgccggtgggccgttctcgcgggcgcatgcatacgctgttttcagcgcttcgcgaggagtactgcgaagagcacgatgcgcgagaaatgatgctctattcgctgctggggacgctgttggtctggctgaaccgacagtgccatcccgcgtcccccgcggaagataaagcggagcggaagcgcagcatgatgcgccacttcgcccgccttatcgagagccactaccgacagcatctcccgttggcggagtatgcgaagctgattggactgtcggttacgcacttaaattatttatgtcgtgagttttatggctgtagcgctcttggagtattgcatcagcggttgatgcttgaagcgcgacgcaatctgcagtacacccgcatgacgattacacaactctctgattatttggggtttagcgatgcagcctatttttcgcgttttttccgtcgctatagcggtatgtcacccaaagcatttagagaaacaattaaagataatgcttcataatgttcagtactgaaattatttttgctaaataatgtttttatcttttctaatttattagcgcaggaacgtctgtgttaatattaatcgcaagtatacacggcaataatattttacacggtatgaccacggttcggtcgttacgtatatcgtgtgcgcaggccatgaatatgattttaatattcatccaggaaatgatatggcgataaagtcgctcgccgatcgtttgcaggcaagcgaaggaacttcgacaggaagcggaggtgttatgttaccaggacaaggtaagtttggcgtcgttattagtaaaattcccgtcatgcaatcagggttaaaggtgatcttcaatgagaacctccctgattacgaactgagtttttgtcgttctcatgatgagctcacccttttacaactgcggcgggcggtgctggttgtcgcggatatctccggcgagattgcgcacccccgagccgtctgcgagcgttattactccctcatgactcagtaccgtgatattcactgggtttttatggtcagcgacagcctctatccgttggccgttgagctattaattcgtcctgaaagctcgttgatctccgagagcgagccggttaaccggctgattgaggtgatttgcgccggtagccgtgcggctgaacagattagccgtacgctgtttgccggggatgaggacagcgatttcgcaagctaccactctgcggcgatgctcactctttcagagcgtaaagttctgcgccttctggcgaaggggtggggaataaaccagatcgccgcgctgttgaaaaagagtaataagacgatcagcgcgcagaaaaacagcgcaatgcgtcgcttatctctacgcagcaacgctgaaatgtatgcctggatcaacagcgcgcagggaatgcaagagctgaatatcaattcagcttacggggagcaaatggaatggaaaaaaatagtacaacccgccatgtcgccatcgtagaaaaatgcgtgatgacggaaatggcatggcgctatatctttagtcgtgaagataatcgccgttatcatattcatctgtttaaaaatgtcagtatgctcagggcggcggaaataccgtttccctggtcaaccattattttttctctttcgggaagtcgttcttcacgagccgagagtctgctctttgttcatgaaatggcgcggtgccggccggaagtccaaacgattattctggctaataatgaaagtgaaatgcacctgatcggccatcttatgccggcctgtttgcacggcatactgaataaatccgcgccgcgacgcgggctacaggagcgtttgctgcagctactggacaatcatcatctcagcggcagcgaacaattttgcgacagagaggcgtgcaacgatccgctaagcccgacggagcacgccatccttcggtatatgtcgtggggatattcgctttctgatattgcgatacagctcaaccggaatattaaaacgatccgcgcgcataagtttaacgccatgaccaagctcggagttcgctcagacattggtttattaaacgcggcggatatcctgttgcatttaccgctcaatagtacgaccagcgccgttaaacaggtagcgtaatgcggctataaacacacatctacccatgttgcatcggtgagctgcgccatgcgttctggttcaatgcgaaccgcgctatggatggctcccgctgcgggtagtacttcctgataatgtctgagagagacgtcgcagtagactgccagcggattttccagaccaaacgggcaaacgccgccgaccggatgaccggtccaggtaaccacttcatcgctgcttagcatgcgtgctttcgcgccaaaggtctctttcagctttttattatccagccgcgcatcgcccctggcgacgatcagtacaatcttatctttgatcttgagcgacagcgttttggcaatttgccccggctcaacgttgtgtgcggcagcggcaagtgcgacggtggcggtactctgatttaactcaataatttcgatatcgggggcgtgttcggcaaaaaactgccgtacagactgcagactcattggattctcctgatttaagcctggttaaatctgtcacaagcctggcggagtgtaaatatcagcgcggacaatccagattctttctattttgtcgatctccttcacaatcaccgtaaccggttactgtaaccggttgcggttatctgcattgagatgaatactggaacagtcacttctccttttatttataacaaaagagccgtgtatgaatcgttgcctcatgagcagtatagccggttgcataatccgccagcggcctgctgcgtcaaaaagcggtcatcgtaacggcagggtaatcgttgttgggccagtatcaatagcctgtcaggagggctactatgtctgctaaccatgctgcgtttaatttgatatttcgctttgtagaaaattacataagccccatagcagggcggatctcgtcgcagcgccacgtcatggctatccgtgacggatttatctcagcgatgccgtttatgatcgtcggatcgttcctgttagtgtttgcttatccaccgttctcaccggataccacctggggttttgcccgcgcctggctggatctggcgaaagagtttgaggggcgtattctgaccccctttgatatgacgatggggatcatgtcgatctacatctgcgcggcaatctcctataacctcggtaagcattacgagaaatccaatcagctcgatccctttatgtgcgcaatgctgtcgatcatggcctttttgctgattgccgcgccgaagaccaatggcacgctgccggtggatagcctcggggggaccgggatctttaccgccattctggtggcgatctactgcgtggagatgatgcgtttcttgaaagcgcacaacattgggatccgcttgccggaccaggttccgccgatgatcaaaaactcgtttgatctgctgatcccggtgctggtggtcgtgctgacgctctatccgctgagcctgtttatccagcaccattttgacatgctgatcccgcaggccattatggccattttcaagccgctggtttcggcagccgactctctgccggcaattctgttggcggtgctgatcggccacctgctgtggtttgccgggatccacggtgcggcgatcgtgtccgggatgctgcagatgttctggctgactaacctcggtatgaaccagcaggcgctggcccagggcgcgcctctgccgcatatctttatggaagcgttctggaccttctttatcgtggtcggaggttccggggcgaccatgggactggtgttctgttatctgcgcagccgttcagcgcatttgcgctccattggtcgtttgagcgtggtgccaagcctgttcaatatcaacgagccggtgatctttgggacgcctatcgtcatgaacccagtgttctttattccgttcctgctggcgccgatggtgaacgcggtactggcctgggcggcaatgaagctggatctgattggccgcgtcatctccgtcgtaccatggacggcgccggcgccaattggcggcgcctgggcgctgggctgggatttccgggcggcgattctggtcattgttctggcctgcgtgtcggcaatcatctacttcccattctttaaggtatatgagaaacagctgcttgctcaggaagcggaagaggccgagcgggcggagcaggagagtcaacagaccgcataaatagcaacgggcggtaaaggccgcccgttacttttcaggtaagtggtaattatttaagcgtacagtcgccgcactgttggacatccggcaggcgatagcgctgacagcaggtgcgtcggactaactgcccttcacgcagcatcaccgttcgccacagcgggttatcctggccatcggcgagttgtttttcaaaaaaacagtgctgacgtagcgcggcaagccgctcatcacccagcagcgcgcgcatttccccaagataccagttaatcagatagccggtattgctccagataagtttgctattgatttcgcccgtcgctgccagcgcctcaacaaccggctgcagggtgcgcgttaccagggcatccattcgcgcctgcggtgaaagcctctcgatgtcggcatcgctatgcacatcaatccagaagcaggccgcccggccgctttcatgaaattcgacatggaaatgttctggcgccaggctgaggccttgcggttcattgagcagcgccagcatcagcggcggcaccagcaggccgatataccattgcgcccagagcgagagcagaggcttctgttcccgaggcagcgtcggctgatgacgatagatatgatcggaccaggtggccagcagggagcgcaaggcgatgggttgcgaccattcggcaagcgttaacgcgtgccgtggggcgggttcgtcaagtcgcaggaaatcaagcaggtgtggacgcagggtggcgattttttcccgaatactctccgccagggcatgctcagccgtcggcaaaggagcccgccagataagttcatcgctgagaggaagggaacgccaggccattcgatttccagatacaaatctaaatgataatgattactgatattagttgcttgcaggcggcatggcaaggcttttatcggcgccgcgatgtcgcagcgcgcgcaggtcaactggcaagaataatgttgcggcctttattttttgcctcatagagtgcgccgtcggcgcgcgccagcgcttgttcaatgttgtcattaatgagcggcgtcaggccaatactgatggtgacgttggtggcgacgctttcattaaacatatgcgggatcttcaggtcatagacccgctgacgtatacgttcggctgtcttccaggccgtttcttcgctgctattggtcagcagcaccataaactcctctccaccaaagcgggcgacaatatcgcgtgagcgtacagcgttgcgaatggcagcagagacgcgaataagcgcctggtcacccatcatatgaccatagtgatcgttataggccttgaagtgatcgatatcgaggagcagcacgtagtggttgtcgccgtccagcgccagcagggtatcgaggcggttctgcagtccgcggcgattatacaaaccggtcaggggatcgagcatactgagatcgttgagcgtattgcgttcatgcatcagtttatccattaaaccctgcgtaaaggcatcgctgcgcttctggataatattttgcagggtaataccggctataggcagcataaagcagtaagtcatacgcaaccattgttccccctccgccattatcaggcaggcaaggaaagttggtaaagagtggagggtaaaggcagtgatattattggaaaaagcgatggtgccgataaacagaatgcttaatagggcgatcaccagatagttaaaatgcggcggtgtcaatagcatcgcttttgtcactacgtgccatgcccatagcatgccaaataacaacgagatagtgggaatatttattttcgattgcggccatttccagtgccagagcagcagcagcccgctgcagacgacgatcagggcgcagggcagcgtaaaacgaactaccgtaaataggggggtgaccagcgacagcgaggaagaaatgaaattaagcagtaaaaaaagccgtaaggaatattgatatttttgtgcgtagtgtgctcgccaggtttgtgcagtcatatcggaagaatcattattagtcgttaaatttcaaaatgatgaaagccaaaaatgaagagtctgataacaatgtgcaaaaaaaggttatttgcaaaataagcaaaatatttaatatatatcgataatccgcttaatttatcaccttcatgaatgtatgtcattaccgcgaacgtaaagaaaaaggggcagagcacgtcgcaaatgacaaatgataaagattatcatatgatattggttatcattatcgttgtaagaggtgaaaccatgctgcagcgagcattaggaagcggctggggagtgatgattcccggcgcgctaattgtcgctctcgggtatgccggagtgtcggctgacgtatggcgggtactggtcgcggtgggcatgctgatgtccgcggcgatgatctggcatcgtcaattgcgccattttatcctgctgccatcgtgtgtcgcgttgatcggcggaataatgctgatgattgtggatattaaactgagaggataatgccgggagagggaagaatattggtgcgaggggggggacttgaacccccacgtccgtaaggacactaacacctgaagctagcgcgtctaccaattccgccaccttcgcacagtattctttctttgagatattgcctcgttggtgcgaggggggggacttgaacccccacgtccgtaaggacactaacacctgaagctagcgcgtctaccaattccgccaccttcgcccagtgcgagcaatatcttcgtggattatggtgcgaggggggggacttgaacccccacgtccgtaaggacactaacacctgaagctagcgcgtctaccaattccgccaccttcgcataccatcgatactctgaaagtatcgttaccacggaggcgcattctagtggttttcggcgacacgtcaatagttaattatgcaggttgtatcgattgctgcaaaaatgggcggatttgcccgcgggaagcgccagcggtaccaggagcgggccgccggcgtgaaaagacgattattttttcgcctgacgggtcatgatggtgcgatagaccttaaagcgcccggtctgagcgatcacctcatggaagccgaacgtttcatccagcacctgcggatacggcaggaaggcgttggcgacaatgcgcagctcgccgccgctgttcagatggcgaaccgcgccgcggatcagcgcctgggcggcttcgagactggtctgcaggccgtcatggaatggcgggttggagatgatcatgtcgaagcgaccattgacctcggagaagacgttgctggcaaacacatcgccagccaggccgttggcggcaagcgtcgcgcggctggcttcgaccgccggggcgctgacgtcgcacagggtgaggcgcactttcggtgaatggctggccagcgcggcggccagcacgcccgcgccgcagccgacgtcgagcactttccctttggtatgcggctcgagggtggagagcagcagctggctgccgacgtccagaccgtcgcggctgaagacgcccggcagggtttttatcgtcagattatccagtgtgtattcgccccagaatgcgtcggcgtcgaaggtcggctgcttttccagacggccatgatagaggccacagcggcgggcgctatccactttgtttaatggcgcgtattcagccagcatctgctccgcgctgcggacgccgctgcggttttcaccgacgacgaaaatgtcgcttcccaccggcagcagagagagcaggttcatcagctggaactgcgcctctggtttgttctttggccagtagtagatcagggtgtcgcattcggcgacgtcagcggcctcagccactaagctaaaacggacggtgtcacccatctggcggttgaggacctgccagtggtggaactgttgggtatgggcgcggctggccgcggtatccagacgcgcaggcaggtcatcctgcaggtcaccggcaaacagaacgcgggcggactcgaaatcatcactgtggcgcagcaagacttcacttgccggggtaaaagcggacatgaaacactccttcattaagactggcgccgattatagtagtttgttggcgcagatacgacggatttgctatattgcgcgcttgtttaacaggagtgtttcgctatgacatcccgacgagactggcaattacagcagctgggcattacccagtggtcgctgcgccgaccgggggcgttgcagggcgaaatcgctatctcgcttcctgaacatattcgtctggtgatggtggcggaaaccccgccgtcgctgacagagccgctgattggcgacatattacgcgcgctggccgtgacgccagatcaggtcctgcagctgactccggagcgggtggcgatgctgccgcaggacagccgctgcaacagctggctgttgggcacagaggcgtcgctgccgctggcgggcgcccaggtgtccacccccgcttttgatgaactccagaccagcgcgccggctcgcagggcgctctggcaacaaatctgcgcacatgaacacgatttctaccctcagcacggctgatttaaccaaagcctggcacatcgaaaaacgcgcccacgctttcccgtggagcgaacagactctggccagtaaccagggggagcgctattgcaactatcagctgtcggtagatggcgaaatggcggctttcgccattacgcaagtggtactggatgaggcgacgctgttcaatatcgccgtcgatcccgcgtaccagcgccgcggcctggggcgagcgctgctggagcatgtcattgatgaagtcgaaaaactcggcgtcgtcacgctgtggctggaggtgcgagcatccaacgttgccgccatcgcgctgtatgagagcgtaggcttcaatgaggcaaccatccgccgcaactactatcctacggccgacggacgcgaagacgccattattatggctctgccaatcagtatgtaacacaaggtgatacgatgaaatgggactggattttctttgatgccgatgaaacgctgtttacgtttgattctttcagcggcttgcagcggatgtttctcgactacagcgtgacctttaccgccgaagattttcaggactatcaggccgtgaacaagccgctatgggtggattaccaaaacggcgccatcacctcgctgcagctgcagcaccagcgttttgacagctgggcggaacgtttgaatgtgccgcccggggaactcaacgacgcgtttatgaatgcgatggcggaaatctgtgccccgttgccgggcgcggtctcgctgctcaacgcgctgcagggcaaggtcagaatgggcatcatcaccaacggctttacctcgctgcagcagactcgtctggagcggacaggtttacgcgatcactttgatttgctgattatttctgaacaggtgggtgtcgccaagccggacgcgcgtattttcgattatgcgctggcgcaggcgggtaacccaccgcgctcgcgggtgctgatggtcggtgataccgccgagtcggatattcgcggcggcgtgaacgccggactggcgacctgctggctcaatgcgcatcagcgcgagctgccggcggatctcgagccggactggacggtgacctcgttaagcgaactggagcagctcctgtgtaaacactgattgcctcccccccgttgatgggtaaaatagccgcaatttttcgtattccacatgcgtggcccatggccgcgtttacttagaagattaattatgacgttgtctccttatctgcaagaggtggccaaacgccgcacttttgccattatttctcacccggatgccggtaagaccaccatcaccgaaaaggtgctgctgttcggacaggcgattcagaccgccggtacagtaaaaggtcgtggttccagccagcacgcgaaatccgactggatggagatggaaaagcagcgtggtatctcgatcaccacctcggtaatgcagttcccgtatcatgactgcctggtgaacctgctggataccccggggcacgaagacttctccgaagatacctaccgtaccctgacggcggtggactgctgcctgatggtgattgacgcggcaaaaggcgtcgaagatcggacccgtaagctgatggaagtcacccgtctgcgcgatacgccgatcctcacctttatgaacaaactcgaccgtgatatccgcgatccgatggagctgctggatgaagtcgagaacgagctgaaaatcggctgcgcgccgattacctggcctatcggctgcggcaagctgttcaaaggcgtttatcatctctacaaagacgaaacctacctgtatcagaccggtaaaggccacaccatccaggaagtgcgtatcgtgaaggggctcaacaacccggatctcgacgcggcggtgggggaagacctggcgcagcagctgcgtgacgagctggagctggtgcagggagcgtcgaatgagttcgacaaagatctgttcctggccggggaaatcaccccggtcttcttcggaaccgcgttaggtaacttcggcgttgaccatatgctggatggcctggtggagtgggccccggcgccgatgccgcgcaacaccgacacgcgtgaagtcaccgccacggaagagaaattcaccggcttcgtgtttaaaattcaggccaacatggatccgaaacaccgcgaccgcgtggctttcatgcgggtggtgtccggcaaatatgaaaaaggcatgaagctgcgtcaggtgcgtatcggcaaggacgtagtgatttccgacgcgctgacctttatggcgggcgatcgctcgcacgttgaagaagcgtacccaggcgatatcatcggcctgcataaccacggcaccattcagattggcgatacctttacccagggcgagatgatgaagttcaccggtattccgaacttcgcgccggaactgttccgtcgtattcgcctgaaggatccgctgaagcagaaacagctgctgaaagggctggttcagctctctgaagagggcgcggtccaggtcttccgcccgatcgctaataacgatctgatcgttggcgccgtcggcgtgctgcagtttgacgtggtggtagcgcgtctgaaaagcgaatacaacgtggaagcgatttacgaatcggtcaacgtggccaccgcgcgctgggttgaatctactgacgtgaagaagttcgaagagttcaagcggaaaaatgaagttcagctggcgctggatggcggcgataacctgacctacatcgccccgacaatggtcaacctgaacctgacgcaggagcgttaccctgacgtggtgttccgcaaaacgcgcgagcactaatccctgacgaagcgcggcgcaggccgcgcttttttctgattacgcccccgttcccttccttctggaaagttcttaaaacaccgctaattcgtctgttttttatccatatcctccgcaaccccttcgtctgtctactatatttaattcgtgtttttaaaaatgctggcgtaattcactgcgataagacgccagcgctggtgaaaaaacgaggacataacgatgaccagactaaagaatgccaatatgttgctggcgctcttcttaggcttagccgcgttgaacgcctcggcagagacggaaaaaacaacggtagacagtgcgaagtcggctgccagcaatgcgggagaggcggtagataattcgattaacaaagtcggcgattttatggatgacagtaccattaccgcacgggtaaaagcggcgctgatcgaccataaagatattaactccggcgatatttcggtgaaaacggagaataaagtggtcaccctcagcggcgacgtcaccagtgctgaacagaaaagtcaggcactgagcgtagcgaaagaggtcaaaggcgtctcacacgttaacgacaagctgacggtccatcataaatcatcgagcgagacggcgacgctgaaaggctatgccggggataccgccattaccagcgaagtgaaagccaagctgctggcggatgacattgtcccttcgcgcaatgtgaaagtcgaaaccaacgccggcgcggtacatctgaccggtacggtggcttccgcggcgcaggcggagcgtgccgcagagattgcgaaagcggtctccggtgtgaaaagcgtgcgcaacgatcttagcgttaagtaaaccgagttattaacaaaagtgttgtctggccaaggttgccgaacgaatagcagcatccactgagcgatgagctatacagaaggggtgcgcaaaccgctgttcaccgtccattatggtaaggagaaaagtatgtttcgatggggaattatttttctggtcattgcattaattgctgcggctctgggctttggtggtctggcgggtacggccgctggcgctgcgaaaatcgtctttgtcgtcgggattatcttgttcctggtgagcctgtttacaggacgcagacgtccttaggcggcccgcgatgcgggcgatactgaagcctaagcatttttactgacacgtcatcttacacaaagccagtcctgaggactggctttcgcggtttaagcggcgggcaaattgcgttaccttgtcaggagaagatcaatcgaacaggaaagcagggtggggcaacgcattcccgtcacgctgggcaatatcgccccgctggcggttaaacccttccgaccaggcaagctggcgctggtatgcgaaggcggaggacagcgagggatttttactgccggggtgctggacgaatttatgcgcgccggatttaacccctttgacctgatgctgggtacttccgccggcgcgcaaaacctctccgcctacatgtgtaatcagcaaggctatgcccgcaaagttatcacccgctacaccacttcacgccagttttttgatccgatgcgctttgtgcgcggcggcaaccttatcgatctcgactggctggttgaggccacttcgcagcaaatgccgcttgccatgaactatgccgaagcgcagttcgcgttggggaaagagctgtggctatgcgcttgccgcggtgacgattactccgccagctatttttcgccgacgccgcaaacgtggctggatctgatccgcgcctccagcgccatccccggcttttatcgcagcggcgtgttgctcgacggcgttagctacctggacggcggcgtcagcgatgcgatcccggtgcaggaggcggcccgccgcggcgcccagaccatcgtggtgatccgtaccgtcccttcgcagatgttttataccccgcagtggttcaagcggatggagcgctggctgggagagagtagtctgcaaccgctggtcaatttggtgcatcatcacgaaaccacctaccgcgccatccagcagttcatcgagaaaccgccgggtaagttgcggatcttcgaaatctatccgcagcggccgctgcgcagcatggcgcttggcagccgactaccggcgctgctggaggactacaaaaccgggcgccagtgcggccgttatttcctggcaacggtgggtaaactactggccgaccagccgccgctgctgcgccacgcgccgcgtattgcccggcccgcgccggtggtggtgccgccggtgccggtggccaatgaagcgccccaggcgaccatcattcctgcgccccaggcgaatgaccccagttttgatcatgaggatctggcgtgacgcaccgttttatcgatacccactgtcactttgattttcccccctttgcggcagatgaggtcgccagcctggcgcgtgcggcgcaggccggcgtcgggcgaattatcgttccagccatctctgctgagcgttttagccgcgtgctggcgctggcagctcagcacgaagcgctgtacgccgcgctgggtatgcatccgatcgtcatcgaagagcatactgatgagggactggcgcagctggaagccttgatggcgcagcggccgcctaaactggtggcggtgggagagattggcctcgatctttatcgcgacgatccgcagtttgatcgtcagcaggcgctgctggaagcgcagctgaggctggcgaagcgttacgatctgccggtgatcctccactccagacgcacccacgataagctggcgatgctgctgaaaaaacatgccctgccgcgtaccggagtcatccatggctttgccggcagcctgcagcaggccgagcgcttcgttcagcttggctataagatcggcgttggcggcaccattacctatccccgcgccagtaaaacccgtgaagtgatggcgcgtctgccgctttccgctctgctgctggagaccgatgcgccggatatgccgctaaatggctttcagggacagcccaatcgaccggaacaagctgcacgggtatttgaggcgctgtgcgaactgcgtccggagtcgccggcagccatagaagaagggatcatgcacaatacgctcgccttgttttcccttcccccggtctctgtatggtgatcgatttctcataattgtccatccatatcattgatttgcttaaaatgtgtgaagccagacgggcaggatagtttcaggccgatataatcacgcggttagtactggactatcaaaaacacagggaatctgtatgcaaatcctcatgggacttatcggcatggtggcgctattggccattgctgtgctgctctccaataaccgaaaagccattaacctgcgcaccgtgctcggcgcctggataatccaggtgggtatcggcgcgttaatattgtatgtaccggccgggcgcgcggcgctattagcgatgtcgaatggcgtcgccagcgttattgcctacggcaatgaagggattagtttcatcttcggcgggctggtctccgataaaatgttcgaggtgtttggcggcggcggcttcgtctttgccctgcgcgtgctgccggtgatcgtcttcttctcgtcgctgattgccgtgctttactacctgggcattatgcagctggtcattcgcattctcggcggcgcgctgcgggcagtgctgaagacctcacgtaccgaatcgctgtcggccacggcgaacatctttgttggccagaccgaagcgccgctggtggtgcgtccttatatcgccaccatgactcgctcggagctgtttgcggtcatgtgcggcggcctggcctcggtggcgggctcggtactggcgggctatgcgcagatgggcgttccgctggagtaccttattgccgcgtcgtttatggcggcgccgggaggcctgctgtttgccaaaattatcgtaccggaaacggaaaaaccggacgataacccggctcatgacagccaaagcgctgacgcggataaaccggccaacgtgctggatgccgccgcctccggcgccgcgtctggtatgcaactggcgctcaacgtcggcgcgatgctgctggcgtttattgcgctgatcgccctgctgaatggcatactctccggcgtcggcggctggtttaaccatcctgagctgtcgctgcagatgatcctcggctggatcttctcaccgctggcgtgggtgattggcgtgccgtggcacgaagcgacggtggcggggtcgtttatcggccagaagctgatcattaacgagttcgtggcctacatgaactttggcgaatatttaaaggcggatgccgaagtggcggcggccgggctgcaggtcatttcagatcacaccaaagccattatctctttcgcgctgtgcggctttgccaacctgtcatcgatcgccattctgattggcggactcgggggaatggcgcccaaccggcggcaggatatcgctcagcttgggctacgtgcggtagcagcggggacgctgtccaacctgatgagcgccaccatcgccggggtttttctcgccctgtaagcctgtctcctgaaccagcggccaccgtgccgctggtgttgctgtaaatgtgataattccatcaccactctcttttttgaaaaaagatttatatttcaatttgtagcgtttttattgcccgtaaattgggcaaaatgtgcgccacgctatcgagtgcatctgttattgtgtgttagaattatcacattctcatcggcggtatagtatcgattatgcttaagaggggactaacgataattgctgcggtattgagtggtaatttgtgatcttaatcacgttacagtaatgcaaattagtaagtagttttcattaactgtgatgaatgtcgaagtgtaacgacgagcgaatgttacaatagtaacagactcgcaaggtgaacaaactattgatccggcatgacgccggcggagtatgaaatgactgatttaaaagcaagcagcctgcgcgcgttaaaactgatggacctgaccaccctgaatgacgacgacaccaatgagaaagtcattgccctgtgtcatcaggcgaaaacgccggtgggtaacaccgcggcggtctgcatctacccgcgcttcatcccgatcgcccgtaaaacgctgaatgagcaggggacgccggatattcgcatcgccacggtcaccaacttcccgcacgggaatgacgatatcgacattgcgctggcggaaacccgcgcggcgatcgcttacggcgctgacgaagtggacgtggtcttcccgtaccgcgcgctgatcgccggcaacgagcaggtcggtttcgagctggtgaaagcctgtaaggaagcctgtgcggcggctaacgtgctgctgaaagtgatcatcgaaaccggtgagctgaaagaagaagcgctgatccgtaaagcgtctgaaatctctatcaaagccggggccgatttcatcaaaacctcgaccggtaaagtgccggtgaatgccacgccggaaagcgcgcgcatcatgatggaagtgatccgcgatatgggcgttgagaaaaccgttggcttcaaaccggcgggcggcgtgcgcagcgcggaagacgcgcagcagttcctggcgatcgctgatgaactgttcggcgccgactgggccgattctcgtcactatcgttttggcgcatccagcctgctggctagcctcttgaaagccctgggtcacggcgacggcaagagcgccagcagctactaatcccttgatttgccggatggcgctgcgcttatccggcctacgaattgatgcctgtaggccggataaggcgctcgcgccgtcatccggcaatttattctctttgggaggttaccgtgtttctcgcacaagaaattattcgtaaaaaacgtgatggtcaggcattaagcgatgaagagatccgctttttcatcaacggcatccgcgacaatactatctctgaagggcagatcgccgcgctggcgatgactatcttcttccacgatatgtctatgccggagcgcgtttcgctgaccatggcgatgcgggattccggtaccgttctggactggaaaagcctcaaccttaaaggtccgatcgtcgataaacactctaccggcggcgtcggggatgtcacttcgctgatgctggggccgatggtggccgcctgcggtggttacgtaccgatgatctccggccgcggcctcggccataccggcggtacgctggacaaactggaagcgatcccgggcttcgatatcttcccggacgacaaccgcttccgcgagattataaaagatgttggcgtggcaattatcgggcagaccagctcccttgccccggccgacaaacgtttctatgccacccgcgatattaccgcgacggtggactccatcccgctgattaccgcctcgattctggcgaagaagctggcggaagggctggacgcgctggtgatggacgttaaagtcggcagcggcgcctttatgccgacctacgagctttcagaagcgcttgccggagcgattgttggcgtctctaacggcgccggcgtgcgcaccaccgcgctgttaaccgatatgaaccaggtgctggcctccagcgccggcaacgccgttgaagttcgcgaagcggtgcagttcctgaccggcgaataccgcaacccgcgcctgttcgacgtgacaatggcgctgtgtgtggaaatgctgatctccggcaagctggcggcggacgatgccgaggcgcgcgcgaagctgcaggcggtgctggataacggtaaagcggcggaagtgtttggccgcatggtcgcggcgcagaaagggccaagcgactttgtcgagaattatgctaattatctgccgacggcgatgctgagcaaagcagtctatgctgataccgaaggttttatcagcgcgatggatactcgcgcgctgggcatggcagtggtttctatgggcggcggccgccgtcaggcatcggacaccattgactatagcgttggctttaccgagatggcgcgtctgggtgaccgcgtcgacggacagcgtccgctggcggtgatccatgccaaagacgagaacagctggcaggaggccgcgaaagcggtcaaagcggccattaaactggacgataaagccccggaaattacaccgacagtctatcgccgtatcactgaatagcgatatactgatctgatcgcttttttgcagcgcaagatgtatggagaacaagatgaaacgtgcatttatcatggtgctggactcctttgggattggcgcaacggaagacgcagaccgctttggcgacgtcggcgccgatacgctgggccacattgcagaagcctgcgccaaaggcgaggctgaccacggccgcaaaggcccgctgaatttaccgaacctgacccgtctgggtctggtgaaagcgcatgaaggctccaccggtaaaattgccgcgggtatggatggcaatgccgaagtgattggcgcctatgcctgggcgcatgaactttcttccggtaaagataccccgtccggccactgggaaatcgccggcgtgccggtgctgtttgactggggctacttcagcgaccaggaaaacagcttcccgcaggagctgctggataagctggtgaaacgcgccaacctgccgggctatctcggcaactgccactcctccgggacggtgatcctcgatcagctcggcgaagagcatatgaaaaccgggaaaccgatcttctatacctccgctgactcggtgttccagatcgcctgccacgaagagacctttggcctcgacaagctgtatgagctgtgcgaaatcgcgcgtgaagagctgaccgaaggcggctataacattggtcgcgtgattgctcgtcctttcgtgggcgacaaagccggtaacttccagcgtaccggtaaccgtcacgacctggcggtagagccgccggcgccgaccgtgctgcagaagctggtcgatgagaaaaacggccacgtggtgtccgtgggtaaaatcgccgatatctacgccaattgcggtatcactaagaaagtgaaagccaccgggctggacgcgctgttcgacgcgaccatcaaagagatgaaggaagcgggcgacgagactatcgtcttcactaacttcgtcgattttgactcctcctggggccaccgtcgtgacgtcgctggctacgcggcgggtctggagctgttcgaccgccgtctgccggagctgatggagctggttggtgaagacgacattctgatcctcaccgccgaccacggctgcgacccgacctggaccggtactgaccacacccgcgagcatatcccggtgctggtgtacggcccgaaagtgaaaccaggttcgctcggtcaccgtgaaaccttcgcggacatcggccagactattgcgaaatactttggtacgtctgacatggaatatggcaaagccatgttctgaggtcattgcccggtggcgcacagcgatccgggcctacgatttgtaggccgggtaaggcgtagccgccacccggcaaaaacaacaatgtaaaaggaactgaagatggcaactcctcacattaacgcagaaatgggcgatttcgctgacgtcgttttgatgccgggcgacccgctgcgcgcgaagcacattgcagaaaccttcctcgaagacgtgcgtgaagtgaacaacgtgcgcggcatgctgggcttcaccggtacctataaaggccgcaaaatctccgtgatgggccacgggatgggtatcccgtcctgctctatctacaccaaagagctgatcaccgatttcggcgtgaagaaaatcatccgcgtgggctcctgcggcgcggtgcgtgaagatgtcaaactgcgtgacgtggtgatcggcatgggcgcgtgcaccgactctaaagtgaaccgtctgcgtttcaaagaccatgattttgcggcgattgccgatttcggcatggtgcgtaatgcggtagacgcggcgaaagcgctgggcgttgacgcgcgcgtcggcaacatcttctccgcagacctgttctatacgccggacccgtccatgttcgacgtgatggaaaaatacggcattctgggcgtggaaatggaagcggcgggtatctacggcgtggcggcggagttcggcgcgaaagcgctgaccatctgcaccgtctccgaccacatccgtacccacgagcagaccactgccgctgaacgtcagacgaccttcaacgacatgatcaaaatcgcgctggaatccgtgctgctgggcgataaagagtaagagctgttgtgccgggtggcggcttcgtctgacccggcctacggttttccaggcccgctaagcgcagcgggctttttttatcagcgcactgcgccggcaatccacgccgacagttctttcagttccgcttcctgctccgggaaatcgccgaccagcgcctcgcactgctgctgtaatacttccgcccgatactgacagccgactaagcgtgccgccagggcctccagcggcgccgggttcaggctatcggtaaaggcctgcgcgcgggtgatatgccctttttcgacgtcaaaatgcagctcaacgccgccccagcgaaagcgctcgtccagaagatgagagaaggccggcgcctggccgaagttccactcccagctgctctgacgggcgaaggtctcagcaaaatttggtagatccggcgtgttgtcgggggagatcacctcggcgtccacccgttcgccgtaatggctgaagaatgcttcctggatcgcctcgcaaacttgctgatgggtaatgcccggcagcagctcaaccaggttcgccacccgtccgcgcaccgaggtaatgcctttagcctgcagctttttctggtccgggttgaggtagttggcgagacggcttaaatcggcgttgagcagcagggtaccgtgatgaaaaccgcggtccatggtttcacgataggcggagccggagactttgcggtcgccgctgtcggttttgaccaccagatcgttgcgcccggaggcttcggcggttacgccgagtgaattaagcgccgtcagcacaatagcggtggagacggttttgtcgtactccggtttgcctgccataaaggtaaagcaggtattgccgaggtcgtggaacaccgcgccgccgccgctgctgcgacgggccagccgcacatggtcttcctccatgcggcgggtattacactccttccacgggttctgcgcgcggccgatgaccacggtatcggcattgcgccacaggaacagcacccgctgggtggcgggcatctggcggaaaatgcactcctcgaccgccaggttgaaccacgggtcgtaagagtcagagagcaggaggcgcaatgtggacattatagatttcctttcttttcatcgtcttcatcctcaaccggcttgttggcggtgagcaggaagggcgattgctgccagcgggtgcgtttgccctgcagcagcgtgcgggtcagtaccacgccgatagccagggacagcaacagcatcaggcgtaaaatattggtggtattatccacctgcttcgcctcggtcgccagggtatgagtatcgagggtcagacgcaggtagcccagcgggccgttttttcctggcaccggttcgacaatctgctggttgaagtagccgccggcttttttaccatccagcgccagccggtcgcgaacctcgacgctttcgccagagcgcgccaccaggtcgccctgttcgtcatataccccggcgtccaggacgcggctgttatgggttagctgggtcaacagctgattgatgcgcttctcgtcaggcgtctcgctgcgcatcagcggcgcaagattcagcaccacctgctgcgccagcgtgcgggccagctcttccagttgcggattgcgttgtttctgactgttctgactgaaccacgaagcgccctgcatcagcgcgacgagcagggcgagacagataagaacaatgaccgcacgatgcagccggaatttcagttttgcgcgaaccatattccacctttgaaaatttgcagcttaatgttgccagaagcgctggttacaaggtagcctcatgcgttattttcctcgcctgaatgaagagatgtggagccgtaatgcctaacagtttgacctggtgcgatctgcctgaagacgtttccctgtggcctgggttgccgctttccctgagcggcgacgaggtcatgccgctggattatcacgccgggcgcagcggctggctgctgtatggtcgcggtctggataaacgtcggctgacggcgtggcagcgtgagctgggcgccgcgttagtgatcgttgcctcctgggtggtcgaggattaccaggtgatccgtctggccggttcgctgactccccgtgcgacgcgactggcgcatgaggcggggctggacgtcgcgccattgggtaaaatcccccatttgcgcaccccgggcctgctggtgatggacatggactccacggcgattcagatcgaatgcatcgatgagattgcgaaactggccggcaccggcgagctggtctcggaagtgaccgagcgggcgatgcgtggcgagctggacttcaccgccagcctgcgccagcgcgtggcgacgctgaaagacgccgatgccagtattttgctgcaggttcgcgacgcgctgccgctgatgccgggcctggcgcagctggtgctcaagctggaaacgctgggctggaaagtggcgatcgcctccggcggtttcaccttctttgccgagtatctgcgcgacaaactgcatctcgacgcggtattcgccaatgagctggagatccgcgacggcaagctcaccggcaacgtgctcggcgatatcgtcgatgcgaaatataaagccaatacgttgcgcaagctggcggaaaagtatgagatcccaacggcgcaaaccgtggctatcggcgatggcgccaacgacctgccgatgattaaggcagcagggcttggcatcgcctatcacgcgaagcccaaagtgaatgaacaggcggaagtgactatccgccacgctgacctgatgggggtattctgtattctctcgggcagcatgaaccaaaagtaagaggtaaacgtggcgaaagctccaaaacgcgcatttgtctgtaatgaatgtggtgcggattatccgcgctggcaggggcagtgcagcgcctgccatgcctggaacaccatcaccgagatgcgcatcgccgcgtcgccgcaggtggcgagaaacgagcgtctttcaggctatgccggtaacgccggcgtgtcgaaggtgcagaagctgtcagatatcagcctggaggcgctgccgcgtttctccaccggctttaaagaatttgaccgcgtgctgggcggcggcgtggtgccgggcagcgcgatcctgattggcggcaaccccggcgcgggcaaatcgacgctgctgctgcaaaccctctgcaaactggcggaagggatgaaaaccctgtacgtcaccggggaggagtccctgcagcaggtggcgatgcgcgcccatcgtctcgggttgccaacggccaacctgaacatgctctcggaaaccagcattgagcagatctgtcagatcgccgatgaagaaaagccgcagctgatggtgatcgactccatccaggtgatgcatatggccgacgtgcagtcgtcgccgggcagcgtcgcccaggtacgggaaaccgcggcctatttgacgcgctttgctaaaactcgcggcgtggcgattgtgatggtcggccacgtcaccaaagacggctcgctggccggtccgaaggtgctggagcactgtatcgactgctcggtgctgctggacggggatgccgactcccgcttccgcacgttgcgcagccataaaaaccgctttggcgcggtgaacgagctgggcgtcttcgccatgaccgagcagggcctgcgcgaagtgagcaacccgtccgctatcttcctcagccggggagatgaaatcacctccggtagctcggtgatggtggtctgggaagggacccgcccgctgctggtggagatccaggcgctggtcgatcactcgatgatgtccaacccgcgccgcgttgcggtggggctggaacagaaccgtctggcgatcctgctggcggtgctgcaccgtcacggcggcctacagatggccgatcaggacgtcttcgtcaatgtggtcggcggggtgaaggtcacggaaaccagcgccgacctggcgctgctgctggcgatggtctccagcctgcgcgaccgtcctctgccgcaggatctggtggtctttggcgaagtggggctggccggggaaattcgcccggtaccgagcggtcaggagcgtatctccgaagcggcgaagcacggcttccgccgcgccatcgtcccggcggccaatgtgccgaaaaaagtgccggaaggcatgcaaatctttggcgtgaaaaagctttcagacgcgctaagcgtttttgacgacttataataagttaaaaggagattagcgatgtcgtcatttgactatttaaaaagcgccattaagcagaaaggctgtaccctgcagcaggtggcggaagccagcggaatgaccaaggggtatcttagccagctgctgaatgccaaaatcaaaagccc

SEQ ID NO: 5333 - DNA, 98409 bp, Unknown
  gut microbiota DNA sequence
ctgaccccatgccgaactcagaagtgaaacgccgtagcgccgatggtagtgtggggtctccccatgtgagagtagggaactgccaggcatcaaacaagtgaagagcccatcctgccggatgggctttttgcgtttctgtcgtccggccagcgtgccggcatgtccccccggtggcgctgcgcttgccggggctacggatccgacacggggctacgtccctgtggccggacaaggtgcgcagcaccgcctccgggaaaatccctcctatatcaccgtcgataaatgactattgcctctctaaccaactcacaataaatgtcgcgatctgtggtacatcatttaaatccagcagcggaagtgaggtcgcgatcgatacatcgctggccacggcgatggtatgctcatcaattaccagctcttctacacgatggccgctgttttgccgaaaaagcaggatcttcggcacgggttcatgtttgaacccctccactaaaaccaggtccagtttgctggcatccattcgactgaccagccacgtgagatctaattccggcttctctggcgtctcggtcatcaatgcccaccgctgttcgctggcgacaatagtttgcgcagcgcccgccttacgcagttcatagctatctttgcccggcttatccacgtccatatcatgatgggtgtgctttatcagtcccgggcgtaatcctagagcgcaaagctcagggataagacgctttaataatgttgtttttccggtaccgctccatgcggcgatcgccagtaatgggatcatgatggctcctgcatctgctgcaaatcttcgagcgtatttacattaatgaaagcagttttcacatcgctgaaattcaccgggcgcccacccatttgtcgcataaaaaccatcaccctgcgctctccatgtgccagataagcctccagttccggaatgatttgacgatgaactaatgcaacggcaggatgatcccgttcgccgtcatgggcccaaacgaccggtgcgtcccctctctgctggataaagcgctccaccaaaaaggacggaatgaacggcgtgtcgcaggggcaaaaaacaaaccatgggctcgcgacctgctgcatcacagcaagcattccggccagcggcccctgataaccctcctgtatgtctcgaaagaccggatatccgctggcacgccactgttcaagatgacgattggcgctaatgactaactcatctacctgcggggctaatgcttccgcgacgtgtcgccagagagggcgaccatttagcgcctgtaatcctttatcaatgccgcccatccgcgtggccctgccgcccgccagcacgacgccggttatcgcctcgctttgcatatgaatatcgcctctttcattgtgggattgaccctgttaacttgtccctatcaagagtaaggagcatgaccatgaaatgtaaacgtctgaatgaagtaattgaactcctccagccagcctggcaaaaagagcctgaactgaacctgatgcaatttttgcagaagctggcgaaagaggccggctatgatggcgaactgagcgatctttccgacgatattctgatctatcacctgaagatgcgcgactcttccaaagatgctgtcatcccgggtattcagaaggattatgaagaggactttaaaaccgcgctgctgcgcgcccgcggggtaataaaagagtaaaaggttgtaagcgctaccgcgtaaagtgcaatgagatgatatcctgaactattcgtacgattatcggatgtcaggatgcacgataaggcttttacttttcagacgcttcgcccggataccattatcgatgggttattcgatctgggtatgcgggtggactccggtctcaccccgctaaacagctatgagaaccgcgtttatcagttccaggacgaagagcgccatcgctatgtggtaaagttctatcgtcctgagcgctggtccgcagaacagatccttgaagaacaccagtttgcgcttcagcttgtagaagatgaagtgcccgttgctgcgccgctcttatttaatgacagcacgcttcatcagcatcagggattctactttgccgttttcccaagccttggcggtcgtcagttcgaagcggataaccttgatcagatggaatgggttggccgctacctggggcgcctgcaccagactggccgcaaacagcgctttactgcccgcccggaaattggcgtgcaggagtacctgctggaaccgcgtcaggtgtttgagcaggcgacgctgatcccctctggcctgaaggccgatttcctgaaggcgaccgataaactcattgctgccgtcatggagcaatggcacggccgtgggaacacgttgcgcctgcacggtgactgccatgccggtaatatcctctggcgcgacggaccactgtttgtcgacttagacgatgcgcgtaccggcccggcgattcaggatctgtggatgctgctcaacggcgataaggctgaacagcgtatgcagctggagactattgtcgaggcctatgaggaattcagcccctttaacagcgatgaaatcgcgctgattgaacctttacgcgctatgcgactggtttattatctggcgtggttgctcagacgctgggacgatcccgctttcccggtcaatttcccctggttaaccggggaggattactggcgggggcagacgtcgacttttcttgagcaggtgaaggttctacaggaacccccgcttcagttaacgccaatgtattaatgtgatatatccaggagagagtaaatcatgaaaaaagtttggctggcgctggctggtatgattctggcttttagtgcatccgctgcccagatcaccgacggcaagcagtacatcacccttgataagccgattgctggcgagccgcaggtgctcgagttcttttcgttctactgcccgcactgctaccagtttgaagaagtgctgcatgtctctgacaatgtgcgccagaaactgccggaaggcactaaaatgaccaaataccacgttgagttcctgggtccgctgggcaaggatctgacgcaggcatgggcggtggccatcgcgctgggcgttgaagacaaaattactgcgccgatgttcgaagccgtgcagaaaaaccagactgtgcagagtgtggctgacattcgtaaagtgtttgtcgacgctggcgtgaaaggggaagactacgatgccgcatggaatagcttcgtggtgaaatctctggtcgctcagcaagagaaagcggcagccgatctgcagctgcagggcgtaccggctatgtatgttaatggtaaataccagctgaatccgcaggggatggacaccagcaatatggatgtcttcgtcgctcagtatgcggataccgtgaagcaactggtagagaagaaataaaaaaaacgccggtcactgaccggcgttactttatctgttttgcaatagctaccgttctttgtccctcatgatgtcagtcaactgacggtctttctcttcccataggccattcagccagcgctggaagctgcgcttaaagttcttatcgttaacgtaatcgccgtgcagctcttcgccaatagggaccagattgatacggaccacaatgcgcgtcaggcggccgcttaacatatcgtaaaatggtcttgtatgattatccgggtagcacagcgtgacgttcagcagtttatcgaactgcgaaccgagtacgttgagcgccatggcgataccagcggctttcggcggtaacaggttgtggtaaggagagcgcgtttcgcgctttttttcttcggtaaaacgcgagccttccacaaaattgacgatagtcgtcggatgcgcgcgaaatttttcacacgaacggcgggtggtttcgacatctttaccgcggcgctccgggtgacgaataagatagctgcgcgagtagcggcgcataaaaggcatatccagcgcccagcaggcgaggccaatgaagggtacccacgccagctgttgtttaaggaagtacttattcatcggaatatgcttgcggaacagcacgcacagcaccacgatgtctgcccagctgtggtggttgctgatcagcagataccagttctttttgttcaggccttccagaccctggacgtcccattttagccagggattgagatgcaacagcagcgccagcccttcgcaccagcagtacatcataaaattgcaaaaaacggatatagagcgccataccgctggaatggggaccagcagtttaatcagcccggcgacgatgatcggtacagagcagataatggtgactaagatggttaaggcgatactcagcggaagtgttatcgcagcgagtaatctcgacatagttagtttattcagaaagttaggctgacaaagagcgcctttaagctgcgcaagaggctgattttaccagaaaacgcggcaaatgacgggtcttaccagaacagaaaaaaacaaggatcttctatccacatggaagattaggtcatcaaattaatgccaggatcgttgatctgtttttaagtggttgataaatggtaaataatactatttattcatttattttcaggggcggataagctgacgttgtaaaactatacacaaagttatccacaagctaagttgtcgcgcgatcgcgacgatcgttgaatcttttccgcgaattgcgggaaaaattcaggatttcatgcccgtctgtggcatcctttatccataatctgataaacaggcacggaaattatggttcagatcccagaaaaccctctcatcctcgttgacggctcctcctatctttatcgggcgtatcatgcgtttccgccgctgactaacagcgcaggggagcccaccggggctatgtacggcgtactgaatatgctgcgcagtttgattctgcagtatcaaccgactcatgccgtcgtggtctttgatgcgaaagggaaaaccttccgtgatgaattgttcgagcattacaaatctcaccgcccgccgatgccggacgatctgcgcgcgcagattgagccgttgcataagatggtgaaagcgatggggctgccgctgatggctgtcccgggcgtcgaagctgacgatgtgattggcaccctggcgcgggaagcggaaagggcaggtcgcccagtcctgatcagcaccggcgataaagacatggcccagctggtgacgccgggcatcaccctgatcaataccatgaccaacactatcctcggaccggatgaggtggttactaagtacggcgtcccgccggagctgattattgatttcctggcgctgatgggcgactcctcggataacattcccggcgtgccgggcgtgggcgaaaagaccgcccaggcgctgctgcaaggcctcggcggccttgatacgctgtatgcggaaccggagaagatcgctgaactgagcttccgcggcgcgaaaacgatggcggcgaagctcgagcagaacaaggacgtggcttatctctcttatcagctggcgaccatcaaaaccgacgtcgagctggagctcacctgcgaagagctggaggtgcagccgccggcggcagacgatctgctggcgctgttcagacagtatgaatttaagcgctggaccaccgacgttgaggccggaaaatggctgcaggctaaggggggcaaaccggctgcgaaacctgcagtgcctgcagcagcggcagaagcggaagaagaggttgaagccgctactgcactttcagcagagcattatgtcactatccttgatgaggctacgctgctcacctggatcgataagctgaagcaggcgccgctctttgcctttgatacggaaaccgacagcctggataacatctccgccaacatggttggtctttcattcgctgttgagccgggcgtggccgcctatgtcccggtagcgcatgattaccttgatgcgccggatcagatcccgcgcgagcgcgtgctgacgctgcttaaaccgctgctggaggatgagaaggtgctcaaggtcgggcaaaatctcaaatacgatcgcggcattttggctaattacgacattgagctgcgcgggattgcgttcgataccatgctcgagtcttacattctcgacagcgtggcgggccgccacgatatggacagtctttccgaccgctggctgaaacataaaaccattaccttcgaagagatcgctggtaaaggtaagaatcagctcacctttaaccagattgcgctggaagaggctggtcgctacgcggcggaagatgccgacgttacgctccagctgcatctgaagatgtggccgaagctacagcagcatgaaggcccgctgaatatcttccagcacattgaaatgccgctggtgccggtgctgtctcgcgttgagcgcaacggcgttaaaatcgaccccgccgtgctgcatgcgcactcgcaggaaattgcccagcgcctggttgagctggagcagcgggcacatgagatcgccggggaagcgtttaatctctcctccaccaaacagctgcaaacgatcctgtttgaaaaacagggtatcaagccgctgaagaagacgccgggcggtgcgccgtccacctctgaagaggtgctggaagagctggcgctcgattatccgttgccgaaagtgattctggagtatcgtgggctggcgaagctgaagtcgacctataccgataagctgccgctgatgattaaccccaaaacgggccgcgtgcatacctcctatcatcaggcggtcaccgccaccggccgtttgtcgtctaccgatccaaacctgcaaaacattccggtgcgtaacgaagaagggcgccgtattcgccaggcgtttatcgcgccggaagattacgtcattgtctcggcggactactcgcaaatcgagctgcgcattatggcgcacctgtcgcgggataaaggcctgctgaccgccttcgcggaagggaaggatattcaccgggcgacggcggctgaagtatttggcttaccgctggacagcgtcagcagcgaacagcggcgcagtgcgaaagccatcaacttcggtctgatctacggcatgagcgcctttggcctggcccgccagctgaacatcccgcgtaaagaagcgcagaagtacatggatctttatttcgaacgttatccgggcgtcctggagtatatggagcgcacccgcgcacaggcgaaggagcaagggtatgttgaaacgctggatggccgtcgactctatttgccggatatcaagtccagcaatggcgctcgtcgtgccggcgcggagcgtgcggcgattaacgccccgatgcaggggacggctgcggatattatcaagcgggcgatgattgccgttgatgaatggctgcggagcgagaaacctcgcgtgcggatgatcatgcaggttcacgatgaactggtctttgaagtgcataaggatgagctcgatgccgtatcgaaaaagatccacgaactgatggagaacagcactacgctggcggtaccgttgctggtggaagtgggcagcggcgaaaactgggatcaagcgcactaagtatacaaagcgcaacgcgattttctgtaagtaagcaacataacttatagagttttgtgaggatcatttgaatttgctatgtaaatagtgaaaaaaaactacaaaaaatgctttatccgtgagcgaaagaagagtaaagttattcgcgtagggtacagaggtaagatgttctatctttcagaccttttacttcacgtaatcggatttggctgaatattttagccgccccggtcatttatgaccggggcgttttttattgcgcgaaagaaaagttttaggctgtgaaaacaacgtagtatgaacgtccggatagggcgctacgcgccgttatccggaaaaagcgggggttactcggcgtcttcgacggcttcttgcggcgggatttcgttaaaccagctatccagcttctgtcgcagcttatcgacgccagattttttcagcgaagagaagggttcaacctggacatcgccattgaaggccagtaccgcttcacgcaccatattcacttgcgctttacgcgcgccgctggcgagcttatcggctttggtgagcagtaccagcacctgaatatcgctctctaccgcccattcgatcatctgctgatcgagatctttaagcggatgacgtatgtccatcagcaccacgagacccttcaggcacagacgtttttccaggtattcccccagcgcgcgctgccacttgatcttcatctcttcgggtacttgcgcataaccatagccgggcaggtcgacaaggcgcttgccctcagcgacttcgaacaggttaatcagctgcgtacgccccggggttttggaggtacgcgccaggttcttctgattagtcagcgtattcagcgcgctggattttcccgcgttggagcggccggcgaacgccacttcaataccggtatcggcaggaagatggcggatatctggcgcgctagtgacaaagtgcgtcagttgataattccagttggtcaagacggtcgtctccgttaaaacaggctatggcagggattatacctgaacagcagaaaaaggctgtttttaccgcacgccgttcctgtaagtaaaaaccatatggtttgtgagacattgactattctttgtataggacatacctgaggaaaataagacaaaacatatttaaagtattgaaaattaatcaattatagaaatagagaattctgaaaatagatttttaactgccagactggttgtcgatttttgtcaacaaggtaaagtaatacacaacggcggggatgctgaaaggattaggactcaggacgaggagtcaggaagcgccaggaggcgaagaccacaggatagtcaggatgacgcgcgtcttggagacgttttacagggaaaaggaagaaacagggaccgttggacgctaagggaaagacagggtaagtcgttagcgaacagggaaagaagagcccgttaagggtggtcagtgaggaaaaaggcgacagagtaatctgtcgccttttttctttgcttgctttctgctagattccgcctcaattctatactgaatactactgtctgaagattacacatcatgaaaaaaccgacatccgccacccgtggcaaatccggccgcaagtcgcgtgaagagttaaatcaggaagctcgcgatcgcaaacggcagaagaaacatcgtggccacgcggcaggcagtcgcgcgaacggcggcgatgcggcttcagcgggtaaaaaacagcgtcaggcgcaagatccgcgcgtgggtagcaaaaaaccgatcccgctgggcgtgagcgaaagcagcgctccagcccccaagcagcataaaccaaagagcgagaaacctatgctttcaccgcaggctgagctggagttgctggagaatgatgagcgcctggacgcgctgctggaacgtctggaagagggcggcaccctgaatgctgaagagcagagctgggtggacgccaaactggatcgctttgatgagctgatgcagcagctcggcctctcttacgatgatgaagatgaagaagaggaagagcgtcaggaagatatgatgcgtctgctgaagggtggaaactaacatttgcatcccatcggattcccggtactccttataacccttctggttatatgttatctgctgtggttattcgttaaactacgacggttgtcgcggcgtcagaaatggctgcgcaaccggctcatgacccgcggtgcggtggggccgggacggcgtacccgtcggcggcaccatcggaaggagtgagcatgtctgagcagataatcgactgggatctggccctgatccagaaatataactattccgggccgcgctatacctcgtatcccaccgcgctggagttttcaccgcaatttggcgcggcggaattcgatgccgctgtggcccgttacccacagcgtcccctgtcgctgtacgtgcatatcccattttgccataagctgtgttatttctgcggctgcaataagatagtcacccgccagcagcataaggccgatcaatatctcgatgtccttgagcaggagatcatccaccgcgcgccgctgtttgccactcgccaggtgaagcaactgcactgggggggcggcacgccaacttatctcaataaggcgcaaatcagtcgcctgatggatctgttgcgcagccattttcatttcagcgcggaagccgagatctccattgaggtcgatccgcgtgaaatcgagctggatgtcctcgatcatttacgcgctgagggtttcaaccgcctgagtatgggcgtacaggacttcaataaagaggttcagcgtctggttaaccgtgagcaggacgaagcgttcatctttgatttgctcaaccatgcgcgggagattggttttacctcgaccaatatcgacctcatttatggcctgccgaagcaaacgccggagagcttcgcctttaccctgcaaaaggtcgccgagctcaatcctgaccgcctgagcgtgtttaactatgcgcatctgcccacgctctttgccgctcagcggaagattaaagatgccgatctgccctccgctgagcagaagctggagatcctgcaggaaaccatcggctcgctgacgacggcaggctatcagtttatcggcatggaccatttcgcccgtcccgatgatgaattagcggtcgcgcaacgtcacggcgtactgcatcgtaatttccagggctacaccactcagggcgataccgatctgctggggatgggcgtttcggcgatcagcatgattggcgacagctacgcccagaaccaaaaagagctcaagcagtactaccagcaggtagcagagcaagggaacgccctgtggcgcgggatcgcgttaactcgcgatgactgtctgcgtcgcgacgtgattaaggcgttgatctgtaacttccagctggatatcgcggcggtcgaggcgcagtgggacgtggattttgcgtcttatttcgccgaggatctgaagctgctggcgccgctggcgcatgacgggctggtggctgtggatgataaggtcattcaggtgacggcgaaaggccgcctgctgatccgcaacatctgtatgtgctttgatgcctacctacggcaaaaggcccgaatgcagcagttctcacgggttatttaatattttccccctctcccgcaggagagggggaacaattagctgaacagcccgaccagcgcagcgcacagcacggcagcgactgccgtttgtggcgtgtgactcgcagcggcgccgctcgatatcatactcaccagtgattcaaacatgatgctctcccctaatgccgggcacgatcatactcaactcatcggaacagtaaagtacaaaatagcagcactttgcgccgatcggctatttttcatcatgctgttgtaccctactccatacccaattcttttagcttacgcgtcagggtattacgtccccatcccagcaggcgcgcagcctcctgtttgtgcccctgagtatggcgcagggcggtcgttagcagcgtgcgctccatttcgggttgcgcttctgagagcaggttttgatgaccggatcgcaacgcccgatcggcccactgacccagcagcgtcgcccagctgtcaggctgcatctgcgttgggctatcaggaatcgtggtctcaaacagttcgctcggcagatcctgcgtcagcacctcctggccggcggccatgacggtgagccagcgacaggtgttttccagctgacggacgttgcctggccacgccaggcgggtcagcgctgtctccgtttccggatgcagctgtttggcttcaacgccgagctcgcgggcggctatctgcagaaaatggcgggccaggcgtggaatatcttcccggcgctcacgcagcggtggtaaatgcacccggatgacgttcaggcggtggaacaaatcttcacgaaatttcccctcctgcacgcgctgttccaggttctggtgggtagcggcgatgatccgcacatcgaccttgaccggcgcgtaaccgcccacgcgataaaactgaccatccgccagcacgcgcagcagacgagtctggacatcaagcggcatatcgccaatttcatccaggaacagcgtaccgccgtcagcctgttcaaagcgaccctgacggacggtatttgcgccggtaaaggctcctttttcatggccgaacagctcggactcaatcaggtccttggggatcgccgccatattcagcgcgataaacggcgcttttgagcgtggactatggcgatgcagggcatgtgcgacaagctctttaccggtaccggattcgccattgatcagcacgctgatggatgagcgcgacaggcggccaataatgcgaaagacatcctgcatagctggcgcttcgccgatgatgtcggcagttgggctacttatcggcgcatttcgcggctgctgctgctcttgatagtggcttatcgcccggtcgacgagggcgacggcttcatcgatatcaaaaggtttgggcaaataatcaaacgcgccctgctgataagcgctgaccgcggcgtccagatcggaatgcgcggtcattatgatgaccggaagcattggatggcgctgcttaatctgtttgagcagcgccagaccatccattcccggcatacggatatctgacagcagtacatccggggttttggtggtgagggcatctagcacctcattgccgctttcgaacgttgtgcagctcaagccggctccggtgagcgcgcgttcaagcacccagcggatggagctatcgtcatcaacgatccaggctatccctcgttgcataaacacctctacttccgaataggcaggtataccgaaaattcggtatgacccggccagctggtgaattcaattttgccggagtgctgatcgataaggctacgggcgatagataagcccaggccggtaccgccttcgcggccgctgaccatcggatagaacagcgtatcctggagatggggcggaatacccgggccattatcttcaacgtcgatgcgggcggcgaggcgataacgcaccccgtgcagcgtcagctggaaagcggtgcgggtgcgaagaataatttcgcccccttccggccccagcgcctgcagcgcattacggacgatgttcagcaacacctgttcaatttgatccgggtcgtggggtagctctggtaggctggggtcgtaatcgcggatcaacttcacgttgtccggcaactccatggaaaccagtttaactacccgttcggcgactttgtggatgctttcggtaacgtgcatgcccggatgctgtggtccgagcaggcggtcgaccagatttcttagccggtcggcctgctcaatgatcactttggtatattccgttagcgccgggtcgggcagcgctttgctgagcagctgggccgcgccgcgcaggccgcctaacgggttttttatctcatgcgccaggccgcggacgaggtcgcgagcggcgacctgctgcgcatgctgcagctgctcctggctcaggcggcgctgattatccatcggcgccatttccagcagaataaagccttccggcagccgctgggcggtcaacgacaggatgtgcgaacggccatcgataaccaacgtcacttcgttatcggtaaacccctggcccgcctgcagactctcctgcatcagcccgatattcaacgaaaaatagctcaacagctcaggtaatggggtgccaaacagtttgcgcgagctctgcgccagcagctgctgcgccgcagggttggcaaagtgcaccgccaggtcatcatcgaccagtaaaatactgttgataagggagttaaggatctgcccagcatcgggcagtgtgcctgttgccattcgacagtctcctgaaaatgagtgcaccaatttagtgcagtatagctttttatcggtaaaaagctcgcgagatcagcgtgttggtggagaaaaaagcccatcctgagatgggctgaaagtttccacggcaacaaaatatcccgggcatctcgcgccacaacacgacataccctggatttacagcaaaattagacgctgtagtacagttcgaactcaaccggatgcggagtcatgcgtacgcggtcgttctcttccatacgcagggcgatgtaggcatcgatagcgtcattggtgaacacgccgccagcggtcaggaactcgcggtcagcatccagggcctgcagggcttcttccagagaaccggcaacctgcgggatctctttcgcttcttccggcggcaggtcatacaggtttttatccattgcttcgcccggatggattttgttcttgataccatcaaggccagccatcagcagcgccgcaaagcacaggtacgggttggcagccgggtccgggaagcgcacttcgatacgacgcgctttcggagaggtcaccaccggaatacggatagaggcagagcggttacgggcagagtaagccagcataaccggcgcttcgtaacccgggaccagacgcttgtaggagttggtggtcgggttcgccagggcgttgatggctttagcgtgtttgattacgccgccgatgtagaacagcgcctgctcagacagaccggcgtatttgtcgccggagaacaggttggtaccgtttttcgccagagacatatggcagtgcatgccggagccgttgtcgccgaacatcggtttcggcataaaggtcgcggttttaccaaagcggtgagcgacgttgtgaacaacgtatttgtaaatctgaatttcatccgcttttttggtcatggtattgaagcgggttgccacttcgttctgacctgcggttgctacttcatggtgatgggcttcaacaaccagacccatctcttccatgatcatacacatggtggaacggatgtcctgagaagagtctactggcggaaccgggaagtaaccccctttcacgcccggacggtgacctttgttaccgccttcgtatttggtagaggagttccacgcaccttcaatgtcatcgatcgcgacatgggagccggagatagaggcgccaaagcggatgtcgtcgaacaggaagaattctggttctggcccgaacaggacggtatcagcgatgccggtggcgcgcaggtactcttcagcgcgtttcgcgatggagcgcgggtcacggtcatagccctgcagggtgcctggctcgaggatatcgcagcggatgatcagggtcggttcttcgtagaacgggtcaatgaccgcggtggacgcgtccggcatcaggaccatgtcagattcgttgatacctttccagccaccaatcgaggagccatcaaacattttgccttcttcgaagaattcggcatttacctgatgagacggaatcgtgacgtgctgttctttacctttggtatcggtgaagcgcagatcgacaaacttcacttcgtgctcgttcagcatcgtcaaaacgtgttcagcggacatacttaaactctcccggattggtcattgtcgtcgtggtaacgaaaacttcatactgcttaaaagtggcgttgttgccttaaaaaatataaagcgaaatctgtgccaacttttaaatgccccataaaacgctgtatcatgcgcaccatagtgcaaaaggactgcaccatgatggagataatgcaccaaaatagtgcttcagtgtgaacattgagcaccattttggtgcaatttttgttacggtgcccttttatcgctccgtgaaagcggtcacaaagaaactctgcaatacttgtttgcggaggatgtttgtgatcctgttcagtccttcgcttaatacgtgtacaataacgcgctatttctaatgcctgaggcaaagttgtgatcgaaaatctgcgtaatatcgccatcatcgcgcacgttgaccatggtaaaactaccctggttgacaagctgctacagcaatccggtacgttcgacgcacgtactgaagcacaagaacgtgtgatggactccaacgatttggagaaagagcgtgggattaccatcctcgcgaaaaacaccgcaatcaaatggaatgattaccgtatcaacatcgttgataccccagggcacgccgacttcggaggtgaagttgagcgtgttatgtccatggttgactctgtgctgctggtggtagatgcctttgatggcccgatgccgcaaacgcgcttcgtgaccaaaaaagcttttgcccacggtctgaagccgatcgtggtcatcaacaaagttgaccgcccgggcgcgcgtccggactgggttgtcgatcaggtgttcgacctgttcgttaacctcgatgcgaccgacgaacagctggacttcccgatcgtttacgcgtccgcgttgaacggtatcgcgggtctggatcacgaagacatggctgacgacatgaccccgctgtaccaggcgattgtcgatcgcgtgccggcgccggacgttgatcttgacggtccgctgcagatgcagatctcccagctggactacaacaactacgttggtgttatcggcatcggccgcatcaagcgcggtaaagtgaagccgaaccagcaggtcactatcatcgatagcgaaggcaaaacccgtaacggtaaagtcggtaaagtactgactcacctgggtctggagcgaattgagagcgacgtagctgaagctggcgacattatcgcgatcaccggtctgggcgagctgaacatctccgacaccatctgcgacccgcagaatgtcgaagcgctgccggccctgtccgttgatgagccgaccgtttccatgttcttcaacgtcaacacctctccgttctgcggtaaagaaggtaagttcgttacctctcgccagatcctggaccgtctgaataaagagctggtgcacaacgtggcgctgcgcgttgaagaaaccgaagacgctgatgcgttccgcgtttccggccgtggtgaactgcacctgtccgttctgattgaaaacatgcgtcgtgaaggtttcgagatggcggtttcccgtccgaaagttatcttccgcgaaatcgacggccgtaaacaagagccgttcgagaacgtgacgctggacgtcgaagagcagcaccagggttctgtcatgcaggcgctgggcgagcgtaaaggcgacctgaaaaacatgaatccggacggtaaaggccgcgtacgtctcgactacgtgatcccaagccgcggtctgatcggcttccgttcagagttcatgaccatgacctccggtaccggtctgctgtactccaccttcagccactacgacgacgttcgtccgggcgaagtgggccagcgtaacaacggcgtactgatctccaacggtcagggtaaagcggtagcgttcgcgctgttcggtctgcaggatcgcggtaagctgttcctcggccacggcgctgaagtttacgaaggccagatcatcggtattcacagccgttccaacgacctgacggtaaactgcctgaccggtaagaaactgaccaacatgcgtgcgtctggtactgacgaagccacggttctggttccgccggttaagatgaccctggagcaggctctggagttcatcgatgacgacgaactggtagaagttactccgacctctatccgcatccgtaaacgtcacctgaccgagaacgaccgtaaacgcgcgatgcgcggtgcaaaagaagagtaattttttcttcttgttgttcgctaaaccccgcctctccggcggggtttctttttttcattcctgcatcacacgccaatagtcaaatccagcctttcccgctaaagttaattttccacggcgcggaaggagacaaaaatgctctatatctttgatttaggtaatgtgattgtcgacattgacttcaaccgggtattgggagcctggagcgatttaacccgcatcccgctggcgacgctgaagcagcatttcaccatgggtgaggctttccatcagcatgagcgcggcgagctcagcgatgaagactttgccgccgccatgtgccatgaaatgaatatgcccctcagctatgaacagtttgctcacggctggcaggcggtgtttgtcgcgctgcgcccggaggtgattaccatcatgcataaacttcgtgcccaggggcatcgggtggtggtgctctccaataccaatcgtctgcacaccacgttctggcccgatgaatacccggaagtgcgcgcggccgccgatcgcatttatctgtcgcaggagatgggattgcgtaagcctgaagcgcaaatttatctgcgagtactggaagaagaggggttttccgccgcagatacggtcttttttgatgataacgtcgataatatagcaggggccaaccggttggggatcaccagtatcctggtgactggtaaggagaccatccctgactatttcgcgaaacagctatgctaaaaaccgttcatcaaaaattactccaccatacccggccgctgctggcgtggctaaagctgctgtggcggcgcattgatgaagaccatatgaccactctggcggggaacctcgcctatgtgtcattactgtccctggtgccgctgattgccgtcgtgttcgcgctgtttgcggcctttcctatgttctccgaagtcagcgtgcagatccgtcattttatcttcgccaattttattccggcgaccggggatgtaatccagggatatatcgagcagttcgtggccaactccagccgcatgaccgccgtaggcgcctttggcctgatcgtcacctcgctgctgctgatgtactcgatcgacagcgcgctaaacaccatctggcgcagcacgcgcagtcgccccaaagtttattcctttgccgtttactggatgatcctgaccctcggcccgctgctggcgggcgccagcctggcgatcagttcctatttgctgtcgctgcgctgggcaagcgacctggacggtgtaattgataatctgctccgcctatttccgctgatcctctcctgggcagcgttctggctgctctatagtattgtaccgactacccaggtacgtaaccgcgacgcggtgatcggggcgctggtggcggcgctgctgtttgaggcaggtaaaaaggcgtttgccctctatatcaccacctttccgtcctatcagctaatttatggcgtgatttcggtggtgccgattttgttcgtctgggtgtactggacctggtgtatcgtcttgcttggcgctgaaattactgtcactctcggtgaataccgcaaacttaaaacagaagaaacagaacaaccatgattgcattaattcaacgcgtatcccgtgcaagcgttaccgtggcggacgaggtgacgggcgaaattggcccagggcttctggtgctgctgggcgtcgagaaagacgatgatgaacaaaaggcgaatcgcctttgtgaacgcgtgctgggctaccgcatcttcagcgatgcggaagggaaaatgaacctgaatgtccagcaggcgggcggcagcgtgctggtggtttcgcaatttacgctggcggccgataccgagcgggggatgcgaccgagcttctcgaaaggcgctgcccctgaccgcgctgaggcgctgtatgagtatttcgtcgcccgctgtcgccagcaggaaatgcacacccagaccggaagattcgctgcggatatgcaggtttctttggtcaatgatggtcccgtgaccttttggttgcaggtatgacccagcttccgggcaggctgcgggtaacaaaagagagtacgactatgtatcaccttcgtgtaccgcaaacagcagaagagttagagagctactaccagtttcgctgggagatgctgcgtaagccgctgcatcagcctaagggatcggaacgtgacgcctgggatgcgatggcgcatcatcagatggtagtggatgaagagggcaacctggttgccgtcggccggctatatatcaatgcggagaatgaagcctccatccgctttatggctgtgcatccctcggtgcaggataaagggctgggtacgctgatggcgatgaccctggagtccgtcgcgcgtcaggaaggggttaagcgggttacctgcagcgcgcgcgaagatgcggtggaatttttcgccaagcttggatttgtcaatcagggtgagatcaccactccgaccaccacgccgatccgtcattttctgatgatcaaaccggtcgcgtcgctggacgatattttgcaccgcggcgactggtgcgcacagctccagcaggcgtggtatcagcatattccgctgagtgaaaaaatgggcgtacgcattcagcagtacaccgggcagaaatttataaccaccatgccggaagcggggaaccagaatccgcaccatacgctgttcgccggcagcctgttttcgctcgctaccttaaccggatgggggcttatctggctgatgctgcgcgagcggcacctgggaggcaccattattctggcggatgcgcatatccgctacagccagcctattagcggccgccccagcgccatcgccgacctcggttctctgagcggcgatctcgaccgactggcgcgcgggcgtaaagcccgcgtgcaaatgcaggtggagctttttggcgacgataaacagggcgctgttttcgaggggatctacatcgtgctgccggcgaagccctttggctcgtacgaagagggcggcaacgaggaagagtaagcgcctgcggcagttatcgtcctggcgatgccacacgccaggcgatatcccgcatggcatcacgcgcggcgttgctgatgcctcccagctgaaagaagccgtggatcacccccagatagcgctgacaggaactctccaccccttgctccgtcagccttcggtacagcacttcgccctcatcacgtaaaggatcgaactccgccgtcaggatgtggaccggtggcagaccgtgaaaatcttcgcgccacagcggactggcatccggatgggtagcgggtgtggtcgctaaatacatttcgtagccgctaagcagcgtgtcccgggtaatgatgtaatcctcgccgttgctggcgtagcttgccatgctggcggtagcgtcgagcatcgggtaaatcaggataagctgtgcaggctgccatgttcccgccgctttcaggcgcagagccgtgaccagggcgagatgcccgccggcgctgtcgccggccagggtgatgagcgaagcatccacgccaagctgttttgcgtgctggtgaataatcgtggcacctcgttctgcatcatcgtgcgccgccggaaaagggtactccggggccagacgatactgcacggcgatcacccggcacccactgaaccaggcaagctggcgcaattgattgtcatgggtggcaaagccgccgctgacaaaacagccgccgtggtagtagataagcgtgggtagcaggccgtcggcagtgggcggtgaaacgacgcggaagtgcataccctccagggtgatatcctccacccgcactcgcgtttccgtctccccggcgagtaccgcactggcgatatagccggccctccgatcatcaatatgctgatcgcgtgatgacggacgacctgccgcaataaatgcctcaaccagtgaagcaatccctttttccagcgccatatgaagttccttatactgttttaatatccagtgttatagcctggattatggcgaaaagacaggcctgttgaggtcgcctgtgcattatggaaagcggctcgcaacctgacaaaatcctgtttgtttccgatttcaaaagctgtagattgctcataacttcatcactggtgatatacttgaggtatatatgagcatgatggctgaaagggatatgggcagaattcttctcgatttatcagacgatgtcattcaacgtctcgatgacctcaaagtgcagcgtaacattccgcgagcggaactgttacgtgaagcggttgaacaatatctggagaaacaagatcgagctaaagataccatctccagtgcgctgggtctgtggcaagactgcgaagaagacggcatggaatatcaacgtcagctacgcaaggagtggtaatgacctccggatctgcgctttttgataccaatattcttattgatttatttagcgggcgtcgcgaagccaaacaggcgctggaggcctggccaccgcagaatgcgatcagtctgattacctggatggaggtgatggttggcgctaaaaaatatcaccaggagcagcgcacgcgaatggcgctgagcacctttaatatcattaacatctcacaggatattgcagagcgaagcgttgcgctgcggcaggagtataagcttaagctgccggatgccatcattctggcgacggcgcaactccatcgtctggaactaattacgcggaatacgaaggattttaccggtattcctggcgtagtcacgccgtacgaaatccaccctgaataattcgagtggcaggaggacgacaagtgagcgacagactcgtctgaaacgaatatctccagccaaaggttggcctctgataacggtcagtgacgcgtgtgaataatccctgcgcacgttcgtgtcacaagaaggaaaacgggcgacaagagccgcccgaaatcatactgcagaacttactccccttcgccggggaacatgaacgggttaattgagcttctggcgaagccctcctgttccatgcgggcgtcgagcaccagggaggccaaatcgtcggcgacggcttcgactttcggatccttctcctgatacataatcttcaggtaggttccgcagtcgccgcagctttcggctttcaccgccgcctgctcgttgtccagcgaccagtagtgcaggtcgcggctctgctcgcagttgctgcacttgacgcgtactacgtgccactcagtttcgcacaggttgcagtgcagatagcgcagcccctgagtggtgccgatttgcacgatgctggagaccggcatcgagccgcacaccgggcagaactggcgctgttcgccgtattcggcgcgcgcttttcctgggatcagactggccatctgcgcccagtagagcgacagcgcagcccagataaacggcgctttgtcgctactgacggaggcgaaatcggaaacaaacagcgcgctggccatctgctccagctcctgctcagaggctttttccagattctcaatgaccgccagcgccgggccgctcatctccggcttcagctcggcaatcagcgagtgcaacagcttgtgccagtgcttgtcgcgcggcaggacgtggatatccagcggcggcttgccctgttcgctggccgctttaatgcgggcggtgagatccatctgcagcggatggtcgtacagcactacttcctgggcatgggcaatcagcgcggcaaagcgcaggtaatcgcctagcgggttattagcggccagctcgcgcaagcgttcagcgcggcggttatacagatttttcagcctggggaacagtaacggcggaattgcttccgccgtgcgtttctcgctcgaacccagctcgtcttgcgggattatgcgaatactcattcagatgacttttcctgtttctggcggacctctcggtaccagcgcgggtgatgtttcttcgcccacgttttggtaacccagccttccaccatcgcggtaatggtgcctttcacccagagggcggcgtagatatgcaccatgataaccacaattaacgccactgcggcaaatgaatgcagcatcagcgcaaatcggatcaccgggattgagaaagccggcgcaaaatacggacgccagatgatcacaccgctcaccagcagcagtaccaggaagataatcgccgcccagaatacgcatttctggccgaagttatagcgcccggtatcgcccacctcctcgttgacgacgatcttacgaatattcttcgcccaaaagatatcatcccgattgattaggttgtgatgccagtaacggaaaaacatgatgataaacgacgcgaacatcaccaccccgacgaacgggtggagaattcgcgccagctgcggcgtgccgaggatatgcatcagccagttaaaggacgggaagaaaaagcctaacccgctcaccgccgccaggacgaagcagaaggcggtgacccagtggttgatgcgttccggcgccgtgtagcgcacgatggtgtcacgtcttttcatttgcgcacctcgtctttctcttcatgcagattgtcctcttcctcttccgcgcggttcggaccgacgccgacgtagtggaagatactggctgcgaaggtcgcggcgaagccgacggccgccagcggtttccagatgcctttccagaacttgacggtctggctgatctccgggttttccggcaggccgtggtacagattcggcttgtcggcatggtgcagcacgtacatgacgtgggtgccaccgacgccggccggatcgtacaggcccgcattgtcataaccgcgggttttcagctcagccacgcgttcgccggccagcgttttcatatcctctttggagccaaagtggattgcgccggtcggacaggttttcacgcaggcaggctcctggccgacggtcacgcggtctacgcacagggtacatttgtagacgcggttgtcttccgggttcagacgcggtacatcgaacggacagccggcgatacagtagccgcagccgatgcactgctcggactggaagtcgacaataccgttggcgtactgaatgatcgcgccttctgacgggcaggccttcaggcagcccgggtccgcgcagtgcatgcagccatccttgcggatgagccattccagcttgtcgttttgttccacctccgagaagcgcatgaccgtccatgacttggcggtcaggtccgccgggttgtcatacaccccgacattgtgaccgacttcatcacgaatatcgttccattcggagcaggccacctgacaggctttgcagccgatacaggtggtgacgtcgataagcttcgccacctcctgctggtggtcccgcgcctgaggcgcgggggtgaaaccgttagtcgcggaacgacgaataatatcttgcgattggtaagccataagtcgtctccgttacaccttttccacgttcacaaggaaagctttgaactccggcgtctgcgtattcgcatcaccgacgaacggcgtcagggtattggcaataaagccttttttcgccacgccctcatagccccagtgaataggaatgccgatggtatcgatatccttaccgtcaactttcagcgtgcgaatacgtttggtcaccaccgccttggctttgatatagccgcggttggaggaaactttcacggtatcgccgtggccgatgccgagcttattcgccagtttttccccgatctccacgaactgttccggctgggcgatggcgttaagcagcgcatgcttggtccagtagtggaagtgctcggtcagacggtaagtggtgccgacgtacgggaacttctcggccttacccatctgctcgagatcgcctttgaagacgcgagcggccgggttagagaccacgttcgggtgcagcgggttggttccgagcggcgtttcaaacggctcgtagtgttccgggaacggtccttccgccatcttgtcgatagcgaacagacggcccatcccttccggctgcatgataaacggaccgacgtcgctgccaggcgcggcggcgctgtagtccggaatatccacgccgccccatttggcgccgtcccatttcagcaactgacgcttcggatcccacggtttaccctgcgggtccgcggaggcgcggttatacaggatgcggcggttgagcggccaggcccaggcccagcccagggtattgccgagaccggatggatcggcgttatcgcgacgcgccatctggttaccttccggcgtccagctcccggcgaagatccagcagccgctggaggtggtgccatcatctcgcagctgcgcaaaggagctcagctgttggcctttcttgacgatcaccgcgccggttgccgggtcggtgatatccgccagcgctttaccgttgctttccatcgccacttcttccgatgccggctcgtgtggcgtggagtagttccacgtcatgttgagcaccggctccggcgccgggccaccctcttcggcatacatcttacgcaggcgagtgaagataccggcgagaatttcaccatcggtgacggcgatccccggggcgtccgcgcctttccagtgccactgcagccagcggccggagttgacgatagacccattctcttcggcgaagcaggtggagggcagacggaacacttcggtctggattttcgccggatcgacatcgttcgactcaccatggttttgccagaaggtggacgtttcggtattgagcgggtcgatagtcacgaggaacttcagcttcgacagggaagcgacgaccttgtttttattcgggaacgaggcgaccgggttaaagccctggcaaatatagccattcactttgccctgattcatcatctcgaagtactgcagaacgtcgtagctcttatcccacttcggcagccagtcatagccccagctgttttccgcggtggctttgtcgccgaagaaggctttcatcatggagacgaagaacttcggatagttgccccagtagttgacctggtctttcagcagcggcttcggcgtgttagccgtcaggtaggtctgcaggtcggcctgtttttcgttcggcagcgacatgtagcctggcaggctggtggagagcaggccgaggtcggtcagaccctggatattggagtggccgcgcagggcgttgacgccgccgcccgccatccccatgttgccgagcagcagctggatcatcgccatggtgcggatattctgcgcaccgatggagtgctgggtccagccgagagcgtacaggaacgatgcggtcttatccggcgcgctggtttcagcaatgtattcacagactttgaggaagtcagccttcggcgtaccgcagatgttttcgaccacatccggggtataacgggaaacatgctgcttcagcaggttccagacgcagcgcggatgttgcagcgtagtatcgcgtttggcgaagccgttttcgtccagctcatagttccagctggttttgtcgtactgacgtttttctgcgttatagccgctgaacagcccgtcgtcgaagctatagtcctcacgcacgatcaggctggcgttggtgtaggcttcggtgtattcgcggttgaatttttcgttattcagcagatacaggatcacgcccgacaggaaggtaatgtcggtaccggaacgaatcggggtatagaaatcagccaccgacgccgtacgcgtaaagcgcggatcgataacgatgagcttggcgccgttatgaattttggcttccatcgcccagcggaaccccaccggatgcgcttctgcggcgttaccgcccatcactacgaccaggttggcgtttttaatatcaacccagtggttggtcatcgcaccgcgaccaaatgttggagcaagacttgctaccgttggtccgtgtcagacacgcgcctggttatccaccgccagcatcccgagggcgcgggtgaatttttgcgttaaatagccggtttcgttactggaggcggaggcgcacagcatcccggtcgtcaaccagcggttgacggtggtgccggcgtcgttttgcgcgataaagttggcgtcgcggtcctctttcatcagcttggcgatgcgatcgaacgcttcgtcccaactgatttgctgccatttatcggagcctggagcgcgatattccgggaatttcaggcggctttcagaatggataaagtccaccagaccagcccctttcggacagagcgcaccacggttgaccggatgatccggatcgccttcgatatggaaaatggatgctttggcgtttttcgcgccgtcgccgaggctatacatcaacagcccacagccgacagaacagtatgtgcaggtgttacgggtttcgcgcgtgcgcagcaatttgtactgccgtgtctccgcgagcgcagttgccggggcaaagcccagcgctgctgccgtggttcccgccataccgccagcgcagatcttaaagaactgccttctgctgacctgcatggttcgctccttgtttcgacattgtcacatgtagttatttgctttgcggtgaaggccgcaaaggttcagaattagggcaaatttccctcattcctgaagggataaaaacagaataccacattgtgtgtatgcctgttccaatacggttaaagcaaagtgaacaagaagcctctcgaacaaatcaaaaatgtgacgaatgtcacaggatatcgccaggtctccctctggaaacgcgaggatctgcaacaccctcagccagatgagttagcggaagaggtgcccgtcgcgctggtctacaacggtatctcccacgtggtgatgatggcctccccgaaagatctggagcaattcgccgtcggcttctccttatccgaagggattatcgagcaccggcgggagattttcggcatggacgtggtagcggtgtgcaacggccttgaggtgcagattgagctctccagccggcgttttatgggcctcaaagcccggcgtcgcgcgctggccgggcgcaccggctgcggcgtatgcggcgtcgagcagctcaatgatattggtaagccggtccagccgctgccgttcactcagtcgttcgatttagccaatctcgatcaggccctggcgcatcttaacgactttcaaccggttggccggctcaccggctgtactcacgcggccgcgtgggtccggttgacgggcgaactggcgggcgggtttgaagacgttggccggcatgtcgccctggataaattgctgggccggcgggcggaagtgggcgaggggtggcagcatggcgccgcgctggtctccagccgcgccagctatgaaatggtgcagaaggcggcgatgtgcggcgtcgagatcctgttcgcggtctcggcggccaccaccttagcagtggaagttgccgagcgctgcaatctgacgctggtgggcttttgcaagccgggcagggcgacagtttacacccatccgcagcgtttaattgcgggttaaatattggtcaataaatttgaacaatgacagcaaatccttccgctttttgtttagcgatgtgcgggatactatttaacacatcaaggcacagcgccttatctaaacaactaaatgaaagggtttatatcatgaaaagcatcaaaacttttgtcgcagtaatcgctatggccgcctctttcgcttccttcgctgctgaaaccgtgaccgcaaccgcctccacaatggaaggcgcggaagcgaaaatcgccgcacaggcgcaggctgccggcgcttcgtcttacaaaatcaccgaagcgtttaccggcaaccgcgtgcatatgactgccgaactgaacaaataagcgtatagcaactgtcgaaagagcgcctcagggcgctttttttgttttcgttttccgcttcccgtctctgcgaaatttgccaatattttcctctgctacaaaaaaaatgtggcactaatcacgtttccgttcttttcttaaatcctcctttttatggcaaaggaaaggtcagcacgcctgaatatctcgattttttaacgccatgaaatttaaagatattaaaaacagaaagcgatggagatcactctctttaaatgggatgtatatcacaaaaataggtgtttcgccgtacctgtcaactattcactgcggtaatttaatacgcattatgtgatcttgattgcaaatagaaggcttgtactcagggaaaaatgttgtcaggcaaatgagcgaggatgcgtcatgaaaattggtatcgttattagcggcggggatgtttctggaatgaataattttatattccagatagccaggcaggctaatgctgatatcacgctgtttaatggcggtattccagggctactggagaaaagtcatcaggatatggcgtggcgcgatctggttgattattcaattaccgcggtgccgatcattacctcggggcgaaccagtcgcaaactgcagcgcagtgaatatgaaagcattgctaaaaaacttaaatctctgcgtattgatgtgctcattatggccgggggggatggcagcctgcagtttctgaatacccttagtgaatttgagattaattgctttggtgtgggaatgactatcgataatgatgtgtatggcagtgattatacgattggtttttccacggcctgtgagcaaattattaaagaagtctctcgtttaagaaataccggaagagcgctgcccggtcgggtttttatggttgagatattaggaggctattgtggagaactaacgttgcagtccgccattaaatgtaatgcggatattgccctgatcccggaggcacagatgccgttggccgtgctcgcggaacggattacccggaagctgagtacgcagaatagcgtcgttatcctctgctcagaaggctataccaaagagtactctcccggctttcagggggcgattgataccatgattaaacagctggaaccacaaataggtgtccgtatccgtaaaacgatcgtcggctatggtttacgcagcggtgatccaacctgcgaagagatttatcagggcactattatggccagtgaagtggttcgctgtattcagtcaggtatgaaaaataaagccataataattaattccagtaacaaacctattccgattgatttagtcagtatgaaaaaacgtctggtcgatactgaaggacatcattataaacttgccaagcaactcaatattatttgaggagaccctccatgctgaaaattttatgcgtatgtggctgcggcctcggttcaagctttgccattgaaatgacggcgaaggcagttttaaagaagctggaaatccccgctcatattgaacacaccaccgtttccgaagctggggcctttaaatcggatatgattctgacgcaaaaaacctttgccgacatcttaaccgccgatgctagtgaagaagaaattaaacgtgtcgtggtgttgaataaacttactgataaagaggagattgaaactaagatcgtcgcattcttaaaagaacgtcatctgaaggtggctgattatgaatagcttcgttgcgtttatcgttaaggatttactcggccaggcatccattcttattgcttttattgccatgcttggcctgatcctgcaaaagaaatcgccaggcaaaaccgcggaagggacatttaaaacgctgctcggtttcttaattatgatggccgggataaacatcattgtcgccacgctgaccttcctgaatgatattttcacccagggatttggcatgaaaggctatattaccgatgtggccgccatcgccgggttagcgaatcgggaattaggttcggaggtggcgctgacgctgctggtgatctttgccgtcaatattattatcgcccggctgacgccgctgaaatatatttttctgaccggccaggcgctgctgtggatggcgacgatcggcgccgtgattggctataagtccgggctcaccggcgtaccgctgattttaaccgggggcatcttcggcggcgtgatggcggtgttaatgccggccctggcgcagccggtggtcaggcgcattaccgggtctgacgatgtggccctggggcacttctgtactatcggctatctggtgcaggctgcggtcgctaaagttgtcggaaaaggctctcgctccacggaagatctcgaactgcctgataactttaagtttctgcaggatacctatctggccatggcggtggtgatggtgccgatgtatctcatcccggctatcgcggcggggcctcagtacatcgcgcagttctccggcggcattaattacctgatgtatgccttcatgcagtccattcagtttgtcgccggggtctttgtcctctatagcggcgtgcgtttattactcaatgagctggtgccggcttttcgcggtatcgcgatgcgtattgtcccggatgcaaagcccgctctcgattgcccggtgctatttccctatgcaccgaatgcggtgattgttggatttctggcaacgactgtcggctcgattatcggcatgctggttttcccgatgttcggcctggcgatgattctccccgggctgttaaccaactttttcgccggcggtacggcaggggtatttggcaatgcgctgggcggacgtcgcggggcgatgatcggcggggtgattcacggcctgtttatcacatttctgccggccattctggtacccatgctggagagctacggctttacgggcgtcaccttcagcgattcagacgtcatcagctccggtctggtattaggccacgccttccagaataactggctctttgtcgccttgtttattgtgtttgtcgccgcactggcatggtttgtaaacggtaaatccgctaagccgaaaggggaaagtgttcatgagtctgtataattttaatgagattttaaaaatcgctcaggaaagagattttaaagcgattggctcgtttaacttgcactgtattgagatgttaccggctttttttaaagccgcgcaaaacagccgcagcccattaatgatccaaatatcaaccggtaccgcagagtatctggggtatcggttactggtcgatgccgtgcgttcattagcagacagtgaaaatatcccgacctgcctgcatctcgatcactgctccgatattaaagccatcgagacggcaatgaatgcgggcttttcttcggtgatgtacgacgggtctcacttaagcctcgaggaaaatatcggtaacacgcggattgtggtggaaatggcccggccgcggaatattacggtagaaggtgagctgggggcgatcggcgggtcagaggatggaaaagcggtggctgccgaagatatctgttttactaccgtcgaagacgcgacgcgttttgtgaaggagacacaggtcgatatgctggccgtctccgtgggcactgtgcatggcctgtacacaggtaaagcgcagatacagcatgcgcggctgaaggcgataagcgaagcgacgggcgtgccgctggtgctgcatggcggcacaggtgtcagcgatgaggatatgcggctggccgtcaccgaagggattaataaagtgaacgtcggaacggaaatgaacgtgcagtgggtcgatcgctgtaaatcaacgtttgagaaaggaaaagtaaatgacagcgtacggaaatttttaattcccgccaaccaggcagtgactgccgtattaatggaaaaaatggcgctatttaaatagcgtttttaccgacacatatcttttgttgccctgtcttccgccagggagggagcttgctatgtttgaatcattgaaaacgctgtggaaaaaagagcaaaacccgctgcaggattatgatcaacagtcccgtcagctggcggaagagatcgccagactggaaggcgaattacagcgccagcccgataatagcgacgtgcaaaaaacattgatgttgacttacaaccgggcattatcggtatatgccaaaagtaagagccaccggcaggatatcgatgcgctgtttctgcagattgataatttacgcaatattattcgccgcaatatctaggaacagagaatgaccataaaagaactgcttattgaggccgatgccattcaggttggcgttgtggagtccgactggcagcgggtaataaagctggctgcccgcccgctggaggcaaaaggctttatttcgacggaatatagccaggcggtgatcgacaatactttaaatcatggcgcttattacgtttttgatgaagggattgccatcccccatgcccgccccgaatgcggcgtcagacgcaactgctttagcctggtggtgctggaaaagcctattccctttgcggacagtgaaaaagcggacattgttattatgtttggcgcccgggacagcaatgcgcatatcgaggagggcatccgttccatcgtcgcgctgctggataataatgacaccatggccaaactgcggacggcccgcagccgggaggaggttgtcgcattactatgaacagacatctgaccccaggctgcaaaacggccattttaatcaacggcattccggcgtcggggaagagcaccattacccgtttgctggcggagacctttagcctgccggtattgacgatcgacggcatcaaagagccgtttatggcgcgcctggcccctgtcgaccggccgatgaatcgccagctgggctgcgcggcgtatgaggtgatctggtcgattgtcggcgcatcgcctgccagcatggtctggttgatcgacgcctggttcggctttcagccgcgggagaccttgcagagactgctacagcaggcgggcgtggagcaggtgattgaggtctggaaccatatctctccggagctggccgtcgcgcgctatgcctcgcggctggcgacgcggccgccgggccaccccggagaagagtatttgccggagctggcccagctggccgggcgggcgcagcccatgtcgttaggacctgtactgacgatagaccagcggcacccgctgcaaatcgaaccggttattcagtggcttgaaggcacgatcgccggacagcacagcggttttacagattacgcttactcgtcctagggcatacccgtcaggcgcagcagcgcggtcaccacggcggcggcgataatcacgccgatcagcgggaccttgcgccaggcgaggaacacagcgaaagcaacgcccagaacgcgcgccataccggcgaaatgtgcgccctcatagaaagtggtggccagggcgacggaaaaaagcagcaccgtcgccgcatcggaaagcagcgcctgcgagcgctcggaaaatgccagccgattgccgagcttcgcgccgccgagacgcatcagataggttcccagcgacaggatggcgataccggcgataaacagcgtcatattgcccattattttttcctcgacagtaaaccgaacagcgaaagcagcactggcagcccggtgggcacaaacggtacggcggcaagcgccagcgcggcgccgctggcggcgcggatcagcgtagtgcggtttttaaaggccgggatcaccagcgccagcaggatcgccgggaagaccgcatcaagcccgatggtttccggcgctggcagcagtttgccgacggccgcgccggttagcgtaccgaggggccagatcagcgcgacgccagcgccgcacagccagtaggccgctttgcgctgcgcgggggtgggctgcgacaagccaaagaccacgctctcgtcgttcataatgtggcatccgataaagcttaaggcgcgccgaccaaccagttcgcgtacggtcaccccgaacgggatatgacgcgcattgactaacaggccggcggcggcggcggccagcggactaccgccgctggcgacaatgccgataaacatgaattcagaagcgcctgccagcacggataccgaaagcaagagcggcacccataaagggaagccgtaagccaccgccagcgacccataggacatgcccaccaccccgacggcaaggcagaccaaaacaatcgcttttatcgtgtctccgctgagactggagagagtttgtttcatatcacttagccatatcgaacgaatttccattataatgaacacataatgatcgtttttcaaggcgaacgaattgttcgatataaaaaacaaggggcgggtatgacacagccaatcagcgttatcgccaaaagtctggtgcgggagcgggcgcggaccgggctttcgctggcggaagtcgcgcgtcgggcgggtatcgcaaaatccacgctatcgcaactggagtccggcaacggcaacccgagtctggaaacgctgtggtcgctctgcgtagcgctggatattccatttgccaggctgcttgagccgcaggtgaacaaaacgcaggtgatccgccgcggcgaggggaccaaagtggtggcagagcaggcgaactatcaggccattttgctggccgcctgtccgcccggcgcgcgtcgggacatctatttgctgctcacccagcccggcgccgaccgcatttcgcatccgcatccgccaggctcggtggaacatattatcgtcacccaggggcgggcgcgggtagggctgacgtcggcgccggaagagctcggcgagggcgactatatctgctacccggcggatcaggagcatgtttttcaggcgctggagccggatacgcaggccctgctgatcgctgagcaaaactgacatcgcgtcggcgggggacgcgcgctcgctggacgtcatagccatattgcgggaaactagctttcctatgcgaaaacagggatttttatgtcgctgaaagccattgccaaacaacttgggatctccgtcacgaccgtcagccgggcgttgaacggctacgacgatgtgtcgcaggagacccgcgcccgggttgaggctgaagcgcagcgccggggctatcgccccaacactttcgcccgccgtctgaaaatgggcaccatcgatgccgttggtctcgtcttccctgtccgccccgcgccgctcaacaataacgtttttctcgagatggtcggggagatcagccatgagctggcgcgccatgacattgatttgttgctgatcgccgatgatgagcaggcggataaacatggctatatgcgcatggtgcagggccgtcgcgtcgatgcattaatcgtggcccatactctggatgacgatccgcggctggcgcagctgcaggcctccggctttccgtttctggcgctcggccgtagccgcctggcgcagccctacgcctggtttgatttcgataactatgccggcacctgccgcgccacccgccatctgattcaacagggccaccagcgtatcgctctgctgggcgagaacaacaatcaggcgtttattttgcaacggcgtaacggctacctcgatgccctgcgcgaggcggggttatccgatgcatggctgcgtagcgtgccggcgacgcgccgcggcggctatcaggccacgctggagctgctgcgtctgcctgagccgcctaccgcgattatcaccgactgcaacacccatggcgatggcgccgcgatggcgctcgcccacctggggcgtttaaccggcgacaatcgcgtcgccctggtggtgtacgacgggctgccgcaggacagcatcattgagaccgatgtcgccgcggtgatccagtccacgcgccagggcgtgggacggcagattgccgatatggtgcgtcgcttaatcgccggggaggatctcgccacgctgcaggtgctatggcagccggaatttttcccgggtgaaaccgcctgatcttacccctttttaacccgtaattctgaagccgatcacggatccgaaacgttttggttggcatccgaaacgtttcggatcaacagtaagacattccttgtaatggagatgtctgatgtctgattcgctgattcacctgcaaagcgccggtgccgatattgtgattaaaacccgccctttcgccgaaattgtctactggggaccgcatttaagccacttttcgccgcaggatgccgacagcctaacgcgcccggtcgccaacggtagactggatgtcgattcgccagtgaccttaatggcggagctgggccatggtctgtttggcgcgccgggcattgaaggccatcgtcaggggctggatgcctctccgctgttcaccaccagcgaagtgcggcacgagggccagacgctgaccctggtcagcgaagatccgcaggccggcctgcgcctgcagagcgagatcgcgttggatgccagcggcgtgctgagcgtgcgccatggcgtgaccaatctgcgcgccagcccatggcaggtggatcgcctggcggtcacgctgccggtcgccgaacgcgctcgcgaggtgatggctttccatggccgctggatccgcgagtttcagcctcatcgcctgacgctggagcacgacagctttgtgctggagaaccgccgcgggcgcacctctcacgaacatttcccggctctgatcaccggcagccgcgcctttagcgagatgcagggtgaagtctggggcgtgcatctggcctggagcggtaaccatcgcctgcgggcggaggtgaaaactgatggccgtcgctatctgcaggccgaggcgctctatctgccgggcgaaatggcgctggcggaaggggaaaccttgtggacgccgtacctgtatgccagctactcggcgaatgggctgaacggcatgagccagcagttccatcgttatctgcgcgaacggattattcgtttcccgggcaacaaaccgcgcccggtgcatctcaacacctgggaggggatctatttcgaccacgacccggactacatcatgcgtatggccgacgaagcggcggccctgggcgtcgagcgctttattatcgatgacggctggtttaaagggcgcaacgacgactgggcggcgcttggcgactggtatctcgatgagaaaaaatacccctacggcctgacgccggttatcgatcacgtgaagtctctgggtatggaattcggtatctgggtggagccggaaatgattaacccggattccgatctgtaccgggcgcacccggactgggtgctggcgctgccgggctataccccgctgaccggccgccatcagtttgtcctgaacctcaacattcccgaagcgtttgattatctgctggagcggatgagctggctgctgggcgagcatgcggtggactacgtgaagtgggatatgaaccgcgagctggtgcagcctgggcatcagggacgcgccgctgcggacgcgcaaacgcgccagttttaccgcctgctggatacgctggtggcccgtttcccgcacattgaatttgaatcctgctcctccggcggcggacggatcgattatgaagtcctcaaacgcagccatcgcttctgggcgtctgacaacaatgacgcccttgagcgcaacaccatccagcgcggcatgagctacttctttccacccgaggtaatgggcgcgcacattggcaatcgccactgtcatgccaccttccgccagcatagtatcgccttccgcggcctgacggcgctgttcggtcatatgggccttgagctggatccggtgagcgctgatgaagaagagcgcgccggataccgaaaatatgcggccctgcataaacagtggcgcgacgtgatccatcacggcgtgcagtggcgaatagatatgccggacgccaccacccttgcccatggcgtcgtcagcccggataaagcgcaggcgatcttcctcgtcagccagctggcgatgccggactacaccctgatggcgccgctgcgcctggcgggcctggaggcgagcgcccgctatcaggtgacgctcctcgatcatccgaacattcagatcaccggcgagggcggccacaccatgcggaagctaccggcatggatgacgacgccgcagacggtgagcggtgagtggctgcagcaggcggggctggcgctgcccatcctcgacccggaaagcgccattctgattggtctgcaacgcgtgtgatggtatcgggccgcgctgcggcccttcttgaggaaaatataatgaacccgaccgtctgtacccacaaaaacaaccccaacttctggattttcgggctgttcttctttctctacttcttcatcatggccacctgctttccgtttctgccgatctggctgtcggacgtcatcggcctgaataaaaccgaaaccggcctcgttttctccagcctgtcgctgttcgccatctgtttccagccgatcctcggagtgatctctgacaagctggggctgaaaaaacacctgatgtggatcgtgaccgttctgctggtgctgattgctcccttcttcctttatgttttcgctccgctgctgaaaaccaatatctggctcggggcgctgagcggcggcgcctatatcggctttgcattctccgcaggcgccggcgcgatggaggcctatatcgaacgggtaagccgcaacagcgggtttgaatacggcaaggcgcgcacctttggctgcctgggatgggcgctgtgcgcgactaccgccggaatgctgttcagcattaatcccgaatgggtgttctggatggggtcagccgccgcgctgctgctggtggtgctggtggccatcgccaaaccgcaggccagtcagtccgcgcaggtgatggattcgctcggcgccaatcgcccggcgatcgatttaaaaacggcggtgcgcatgttccgccagcgtaagatgtggatgtttattctgtatgttatcggcgtggcctgcgtgtatgacgttttcgatcagcagttcgccaccttcttcaaatcgttcttcgcgaccccggaagcgggcacccgcgcctttggtttcgccaccaccgcgggagaaatatgtaacgccatcattatgttcagctcgccgtggattattaaccgtatcggagcgaagaataccctgctgatcgccgggatggtgatggcggcaagaatgattggctcttccttcgccaccaccgccgcggaagtcgtagcgttgaaaatgctccatgcgctggaggtgccgttcctgctggtgggcgcctttaaatacatcaccggcgtgtttgacgtccggctgtcggcgaccatttacctggtgggcttccagttcgccaagcaggtggcggcgatcttcctctccgccttcgccggcaatatgtacgatcggatcggtttccaggagacctatatgatcctcggcggtattgctctgacggttaccttaatatccgcgtttacgttagcgggtaaggcgaaaaccgagccgcttcgggataatgcgatgattgtttaatctccgaaatttcatggcacaggaatgtgcctgaaagataagaaagttgacatgttaaatatgagaaacacatgaaagggctatgggttatttttcttcagtaaagaagtattaatacttgtatagctaaccccctcatccccgtgatgaggggtaatgatataatcactcctctgttttcctgcctaaaaatattgatatcttttgagttcattaatttctctcaaggaacgtaaatgaataacgatggccagtaaaataaaaatgcgaggccagagtatggatctatgtaacgcagcaacatgtgaactggattacattcttggcagagatcacaatttatagtgaacaccattgttagagggtatgttcaatcatcatggcatctattaaagacgtagcgaaaagagctggggtctcgacggcaaccgtatcgcgagtgctcaacaatcatcccagcgtcgtgccggaaacgcggcaggctgtgcgtgatgcgatggattatctctgctatgtccccagcaaaagttcgtttcagcttagcggtaaatgttcagggttgattggtgtggttttgcctaacctggtgaatcctcatttctgtgaactgctggcgacggtggaagaagaggcccggtatatcggcaaatcggtgatcgttaaaacgcatcagaatcagccgcagcaggataaacatattattctgaccttagtggggatgggcattgacagtttgctatgggtgccgacagaagcagaagccgaactttcagaatggttaagcattacccggatcccggtcgccgtcgtcacccaggtgtcccggttctttaactccgtatcgattaaccaggaccggggggcagaaagtattgcggaacattttattcatacaggccatctttcgtttggctttgttgcccaggaaggggttgataatcgtaaggtttcatcgtataccaaaaaaatagcgagtcatggtttaaaacttgctaaagataattcgttctggatagccaaaggagagggggaaaagatatcaggccatattagcattcttgatgatattattgcgaaactcagcgatccgaagcgaatctgtacatgtctgctagtgtataacgatattgcggcaaattatattatcgatgggctaaaagaaaaaggcatctccattcctgaagatgttgcgattgccagttttgacaataccttgctggcacaaactaaaaaaataactagcgttgcacagccggtaaatgaaattgctcacctcgcgtttcagatggtgaagcatcaacagcagccggacagtattgaaatgcacgaaattgtctctcggttaattgttcgtgagagcagcgtaaaaattaatattacttccctgtaagggatatatgtttagaaatggcgcgacaatttgcgccatgggctccttttaacaaaaaataggtatatttatgtctgctaccgcaatggaaaagccaagtgcttatgaaaagctggggttgagggagaagatcggctacgggatgggggacgctggttcaggaatgatatggagtgtactggcgctctatctgacgtggttttataccgatgtctatggcctcaatgccggggtggtgggcacattattcctcgttattcgcatctttgacgcgtttagcgatccgctgatgggggcaatctgcgaccgcacggtgtcacgctggggaaaattccgtccatggctattatggatggcgcttccgtttggtctaggcgcggtactgatgttcactaccccagaactcagcatgaacggaaagattatctatgcctgggttacttatctggtcatgtcgctgatttataccgcgattaatattccctattgctccgtcggcggcgtcattaccctcaatcaaaaagagcgcatgggttgtctgtcatggcgctttttcctgaatggcttggcaacattaattatctcctcctctattctgccgttaaccgactggctgggtaacggcgaccgcgcctccggtttccagctgaccatggtcattatgggcggggcggcaacgctgatgttcctgttctgcttttccagcattaaagagcgggtggtatcggttaagcaaaacgagtcgttgaagaaagacctgcgggatattatcaaaaacgatcagtggctcttaatgatctctattactttcctgaacgtttttccggcatttatacgcggtggcgtcactatttattatgcgacttatgtcatgaaggcgtctgtcggatttattaccttctttatggcgctgggcgtggcctgtaatatgctgggcagcgtgcttgccaaaccgcttaccgatcgctttgataagctggcgctgttccgtattattaatattattctcgggtttctgtcattggcgctgtggtttatcgatccgcaatcgttgaccccgctgatggcgctatttatcgtcattaacgttctgcatttaattcaatctggccccattctgtgggcgatgatgtccgatgtcgatgactacggtgactggaagttcggtaaacgcctgaccggtatctctttcgcgggtaacctttttatgctcaaaatggggctggcggtggctggcgcaatcgtcgcctggattctggcgtttaccggctatatcgctaatgaaccacagcaaaattcccagaccattcaaggcattatcatgatgttctcactgctgccgatggtgagttatttcattagcgcgtatctggtgcgctacttcaagctgaataacgccttccttgaaaaaatcaaagccgatcttgcaaaacgtgaactggaaaaaggacgcggttaatgggtaggggagcagtctatccgtattatttatcattcaatatcagtcttaatgaaactagaatattttaagtgattttctgttcatatcagaggaggttctttatgacgcataataattattatgacgtgacgcagtggcatatcggtaatccttataaggatattggggaggttattaacagtattatcctcgatattaaaaaacgacaaaccgcaactgatgttaataacggcgggaaacctggcgccgttatctatattccgcccggcgattatcatctcaagacgcaggtttttatcgatatcagttatttaaaaattatgggtgccggacacggttttgtctcctcaagtattcgtttcaatacgccggctgtcgagtgggcgtatttgcatgatatttggccgggtggtagccgcattctggtcgatatttgtgtgcatcccggcgatgaagaacatgctggcgctgcattttacgtgaaacgcagcggagcgccgcgaattagttcggtggcgtttgaaaacttctgtattgatggcctgcactttattgatgatggattgggaaacaacgatccggaaaatagctatattaacggcaaaacagggatttatatcgccagcgctcaggatgctttccggattacaggcatgggatttatctatcttgagcatggtctcacgatgtacaatagtgatgctatggctatccataataactttatcgccgaatgcggcaactgcatcgagcttcgtggcgccggacaggcttctaaaataaccgataatctgattggcgcaggctataaaggttattcgatttatgcccaaaacttcggtgggttattgatttccggtaacaatatctttccgcgtggcgccagcagcgttcatttatctggcgttgttcgttctagcgttactagtaatcgattgcactcattttatccaggaatgttggttcttgaaaataactgtgcggagaatctcatcgctgcaaatcattttttccgcgatcgcgaaccctggccgccgatgcagacctatgacaatggcctggatgatgcctatggtctgctgcatatcaatggtagtaataactcggttattgccaatcatatttccgaaactattgatatccagtatcttcggccacagggaataaagccggtcatcatccggctggttgccggtaaaggaaactaccttgcgaataatcatattgttgcgaccacggaagcgtcagtgcagcaggcgcacccttccgaagaggacgcttgctttgcggctcaggtcagcgctttgctgacgacggatagattaaaagcccttgatgcggtcgcggtgctggtagaaaaagcgtcgtctcaaaacacgatacttgattgcggcaatagccaacaggtgatgatggacagagcgacgaatgccttcagggctacgccagctcccggcaatatagagatggaataaaccggcaggagacgcaacggcgcagagtaagtcgtcctactcagcgctgaaagcggctgccccactcagcacagcgaggcagccatgatttcacgccagataaaacacttctttgagctccgcgctcagcgggctgttgtccgggttgctgggcatcacctcgcgcatgtatttccaccaacgctggcatacctccgtgctggcgaccgcttcccagcgggcttccgattcaatctccaccgtcgcgaacaggagatggcgttctttatcgagatagatggcatagtggtgcgcgccgtgatccttcaacactgcctccagctccggccagatggggttatggcggcgctggtactcctcgtgcgcgtcggggttcacctgcatgacgaaggctttacggatcataaggcctccagatagagctcgcgaacctcatcgcggctggcggggcgcgggttacacggcgcgcatgggtcggccagcgctttatccagccagccttcgatatcggctttgctgacgccaagctggctaaaaccctgggggatccctacgcgtttgctcagcgtgcggatggcattgatggcctccatgctggcagcttcatcgctcatgccgcgagtatcgacgcccatcgcctgcgccacgcgggcaaagcgcgccaccgcgttcgggcggttaaagttttcgatgatcggcagcaggatggcgttgcataccccgtgcggcagattatgggtggcgccaggctgatgggccagggcatgtaccagcccgagaccggcgctgttgaacgccatgcccgccagatactggccaaaggccatctgctcgcgggcctgcagatcgtgcccatcgcctaccgctttcggcagccacaggttaatcagacgaatggcctcgagggcgttggcgtcggtcagcggatgggcgccaacggagacaaaggcctcgatggcgtgggtcagggcatccatgccggtggcggcggtaacggctggcggaatgtcgagcatcacgctggcgtcgtcgacggcgatatccgggatcaggttcgggtcgataatcacctctttcacctgccgctcgctatcgataattaccgcgttgctggtcatctccgccgccgtgccggcggtggtgttgatggccaccagcggcacgccagcgtttttcactttgccgacgccggagtaggcggtggaggggcctgggttggcggtgaggatttttatcgctttggcggtatcaatcgggctaccgccgccgaaggcgatcaggtaatcgcagcgggccgcctggtaagccgcataaccttgctgcaccagcgcttcggtggggttggggaatacctcgtcaaatagctgataagccatctgctgttcatccagcgcggcgaacaggctgttcagcaggcccagcttcaccagctgaccgtcggtgacgatcagcgccttgccccactgtttgcccgctaccagcttgaccatatcaccgatcgcgcctgcgccgtggaggctgattttaggtagtgccaacataaaactcatgataattctccttaatgttgattttgggaaatccgtttcccctcaccccgaccctctcccgcagggagggggccagggtgagggggaaattaacatcgtcttcgctgcatcatccgccgggtaataatcggcagggagatcaccacgatcagcatggcgccgataatcaccgacatcacgatgccggggacgttcagcaggctcaggccgaaggtcaccagccccatcagaaaggcggcgatgatcaccccgggcatgctgccggagccgccgagaatattgacgccgccgagcaccgccatggtgacaaccgccagctcccagcccatcgccagggtggggcgggtactgccgagccgtgaggtcagcaggaccgccgccagcccggccatcagcccaaccagcgcgaacagcaccaggttatgacgcttaacgttgatcccggagaaccaggcgccggtcgggttattgccgatggcgtaggtccggcgaccaaagttggttttatgcagcaggaaggtgaaggcggccgcgaggaggataaacagcgcaaactcaaaagagagcgccccccacacgtacccctggccgaaccaggcaaagctctccggatagtgattgagtgcctgatcgcccagcaggatataggtgatgccgcgatacaggctcatggtgccgatggtgatcacaatggacgacaggttaaagcgggtcaccagcaagccgttgaacaggccgcacagcagacctacgcccaggccgatgaccaccagcagcggagtgtccatccccgctgccgcgcagaagcccatcaccgttgagctgagcgccatcgtcgaggctaccgacagatcgatttcccgggcgataatcagcatcgccatcggcaggacgacgatcgccttctcggtaaaggtaaaggtggcgtccgacaggttccagatattgaggaagtacggggaagccacggcgttgccgataaataccgccagggtgaccgccagtaaaaacccttcccagcacagcaggcggcgcagcggcgacggcgcggccggggcgtttttcatctcttcagataccatcattttgctcatgatttcaccgcctgtttctgtcgggctaacgccgcgttgcgcaggattaaccgcccgtgaccgcgattgccgcgctcgttgagcagcaccgccatgacgatcaccgccccggaaatcgccatttgccagaagggcgagatgccgatcaccggcagggcgttattgatgaccccgaggaacagcgcgccgcacaggcagcccagcacccgtccgcttccgcccatggtgctgataccgccgatcacgcaggcggcgaccacctggagttcaaaaccgttggcgacgtcgacataggcgacggcgaagcgcgagatccacagatagccgcagaagccggccagcgcgccggagagacagaagctgacgaactgcatttttccggcgttaatgccggtgtagtatgccgccgtcgcgttgccgcccgcggtgtataaggcccggccggtgcggctgtagcgcaggaaataacccaccagcagcagcgcggcgatggcgcaccagctcagtagcggcagccccaggagggggctgcgcggcagactgagaaaatcagcgctcatctgatgtgagttaacccagccgccgtcagtcagcaggaagataatgccgcgataaatgctcatggtgcccagggtcaccacaatggcgggaatgccgaggcgccagaccagcaggccgttaatcatccccatcagcaggcccagcagggttgccagcgccagcagcgccaccaccggaatacccggatagtgggcgttaagcagggcgacgatcatcccggtcagcgccaggttggcggccatcgacagatcgatgcctttggtgagcaacaccatcatctgcccgagggcgaggatgataaggatggcggtatcgttaaacatctccaccagattgcccggtgaaacgaacgacggcgcccggctgccgatggcgccgatcatcaaaatgatgaccaaagccagcagcgcttcgcgatgtttaagccatgcgtgtcccatcatgccgcctcctggccgatgccgctggcggcgctaacgatggtttccgctgtcgcttccccggcctggtattcggcgaccatcagcccttcgtgcattacgataatccggtcggccatgcccatcacttccggcagctctgacgacaccataatcaccgccagcccctggctgaccagctcggacataaactgatgcacggcggcctttgagccgatatcgatgcctttggtcggttcatcgagaatgatcacctcgggctgggtcgccagccatttgccaatcaccactttctgctggttgccgccggagagggtctccaccggctgccgccagctgaaggcttttacctgcaggcgcgaggcgtactcgtcggccagccgccattcccgggcgtcgttcaggacgccgttagggttgagcttgctgagctgcggtaaactgatgttctgggcgataggcagggcgatgatcgctccctgtttctgccgctcttccggcacgcagacgatgcccgcgcggatggcgtcggcgggctggtgaaagcgcatggttctgccgttcaggcggatctcgccggaggaggggcgcgagacaccggagagcgcctgcatcagctcggtgcgtccggcgcccaccaggccgtaaaagccgagaatttctcccttgcgcaggcggaagctgatatgggcaaactcggtaggatgacagagatcggtcacctccagcaccgtttctccgggtgtgcagtcgactttcgggtaggtttggctgatcgcccggcccaccatcatcgacaccatccgctcttcggtgatgtcgcttatcgccccggagctgacgtacaccccatcgcgcaggatggtgtaataatcggccagctcgaagatttcatcgaacttatgcgagataaacaggatcgctttgccgtcctgcttcagacgctcaacgatatgataaaactcgaggatttcatgctgggaaagcgcggcggtcggctcatcgaggatcaccacctgggcgtcgaaagccagcgcccgggcaattgccaccatgtgacgctgggcgatgctgagggttttcagcgtggctcgcgggtcgatctggacttccagccgggtgaggatctcgttggctctgcggtgcatcgccggccagtcgagcgttttcagcagtcccttatacagatactggccgacgaaaatgttttcgctgaccgagagttcgtcaaacagcacggtttcctggtgaatggcggtgatccctaccttatgcgccgactccggcgttggcagatgaatggggatcgctttatagaggatctcgccctcttcgggctgataaataccggtcatcactttgaccagcgtggatttccccgcgccgttttcgccgattaaggcggtcactttgccgggccagagatcaagctgcacgttctcaagggcgcgcacaccgggaaaaatcttggtgatccccttcagcgacagcagtggcgttgatgctgacatgatagttctccacaaaaatcacccctcaccctaaccctcctccacaggggcgagggaacggtccggcgtccgctggccgcatcgcgcagagggccagccgttccccctctccctccgggagagggccggggtgagggaacaaggattagaaaattttcgagaacttatcgatgttgctcgcatcgtagacaaacggcttggccatcgcgccattcccctcggcgtccagcttcactttgcccagcttgcccatactggcttcggttttggtcgccgtgcctttgactaaatcgtcggccagataggtggcggcgtagcccaggtcaatcgggttccagatggcgaagcttttgctggcgccggacttgatcgcgccggccatttccgacggcagccccagcccggtgacatacactttgccgattttgccctggtccttcaccgcctgcgcggcggcaacaatccccaccgacgacggcgagacaatgactttcaggtccggatatgatttcagcagacccaccgcttcgcggtagcttttatccgacagatcgtcaccgtaggcgacggtgaccagctgcaccgacggatactgcggtagcacctttttcatctcctcaatccagatgttctggttcgtggaggttggggtggcgcttaacacggccacctcgcctttctcaacgttcagcgcctgcagcgcatcggcggcaagcttgacgttggtttcgccaattaaggcgttatttgaggggttaagatggatctgacggcctgccggcgccacgccggagtcccatgagaccaccttgatgccgcgctgcatcgcttttttcagcaccggcaccaccgcgtccggatcgttggcggaaatggcgatcgcatccaccccctgggcgatcaacccgttcagcacgtcgatctgcgcctcggcggtggtagtggtcgggccggtgtagatcactttgacatcacctaactccttggctgcctgttgggcgccaacgttggcggcttcgaagaagccatttcccagcgatttcgccacaagggcgattttaacttcggctatggcggaaccggacaacgccagggcggcaacggtgaggatcaagcttgtctttgttttcattgcttttactccacatgagttagttttgtagggtttgcaggtgatatttcgccccgtctcggtgagcggggcgcgatgttgttatggataaagatctaaagcggactgcagcggctgcacgttgaagcgtttgccaagggcgataagctcgtcgcgggtgatggtctgcttcatcccgcccatcgacaagactttcaccagcacttcggcggacttctcggcggtatcgatcaggccgaaggtctcatccagcgtggggccgctgccgaagacgccgtggaacggccacagcaccagcgagtgtttttgcatggtttcggcggtcgcctggccgatttcatcggtgcccggcaccatccacggcagaatgccgacgccatccgggaagaccaccagacattcggtgctaccttcccacagcttacgggtgaaaagatcgctgtggttctccagaacataggtcagggcgatcaggttggtggcatggcagtgcatgatcacccggtctttgccgccggtcagtttgatgcgctcgctgtgcgacaggaagtgtgccggcagctcggaggtcgggacggcatcctccgtcaggccccacaggatatggtatcccgcgccgtcgctgtcgaccttcaccacgccgaggttagcggccgggtcgagctggacgttacggaagaatttgccggagccggtgacgataaacggctggttggccagggttggcatcggctggctgagggcgatatagcgcggtttggcgtggaaatccgccgcgtaaggttcgatatccgcttcatccagacgcagcgtcaggttgccgccgttgcgttcgtcccagcctttcagccaggcgtcggaggtggctttgatcatgccctggacgaaccaggcgtcgataatggtctgcatagtcttgtctttcctgttgattcggtgcggggttgaccccctcaccctaaatatgtgcgtgcccccggattgcgccgtaaacggcttatccgggctaccggttcgtagcccgggtaaggcgtcagccgcgacccggggaagcccgtgcattacccgcgctggctcagaaccgcattctcataagcccgtacgctgtccagccactggctgcccgccggcgtgtcgtgacgctgacagtacatctcccagatggcctgccacggcagcgatttttgctcttcgagcagcgccaggcgggcggtgtaatcgccgtcgttctccagctggcgcagctgggcggtcggttccagcagggcgcgcagcagcgcttttttcatattgcgggtgccaatcacccaggccgcgatgcggttgatggaggcatcgaagaagtcgaggccgatgtgcacgcggtcaaacaggttatggcgaatgatttcgctggcgatggcctgggtttcatcatccagcagcaccacgtggtcgctgtcccagcgcaccgggcggctgacgtgcagcagcaggcgcgggatgtagagcatggcggcggagatcttgtcggagatcacttccgtcggatggaagtggccggcatcgaggcacagcgccgtctgacggctggtggcgtaacccatatagaactcgttggagccgacggtgtagctttcggcgccgatgccgaacagcttgctctccacggcgtcgatatggtgcgccgggtcgagcttctcgctgatcacctcatcaagggcgttcagcagccgctggcgcggggcgaagcggtcaacggttatatccttcatgccgtccggcacccagatattcatcaccgacggcgtgcccagctgttcgccaaaataagcggatacgcggcggctggctttgcagtggtcgatccagaactggcggatctcatcgttggcgtgcgacagggtaaagccgtcggcgctcagcggatgcgagaagcaggaggggttgaaatccagccccagtttgttggctttcgcccacgtaacccagtttttaaagtgctccggcttaatctcattgcgcgctaccggcgcgtcggattccaggtaaatagcgtgcagattgagacgctttggccccgggatcaggctcagcgcctgctcaaggtcggcgcggagttcttctgcattgcgcgctttgcccgggtagttgccggtcgcctggataccgccggtcaggcttcccgccgggttttcgaaaccggcgacgtcgtcaccctgccagcagtgcatggagacgggcagacggtccagctggcgcagggcctcctcgacatccacgccgacggcggcgtagcgctgcttagcaatttcccaggcttgttcaagttgagtggtcatgcgcaaagctccttggtctgttgtggctgaaactgcgccacgaaacgggcaatttcactatcaggattgggggtaaaagtggtgagcgccgcgttgccgcgcactacctgacgaaactcatcgacattggccagctcgtcgagggtcattaactggatgccgatattgccgagggtggaggcctctatcgggccggccacgacggcgatcccgcaggcgtcagcgcacagctggttgagcagcgtgttctgacagccgccgccgacgatatgcagctggctgaaggggtggccgcgcagcgccgccagctcgttaagcacccgggcgtagagcagcgccaggctgtcgaaaatgcagcgcgccagttcggcatcgctttcaggaaccggctgcccggcgtcgcgacaggcggcctggatctcggcgctcatactggccgggttgataaagcggtcatcgttgcagtcaattatgaagcggcacgccggtagcgcggcggtgcgggcgatcagcccctgcaggtcgctgacgttttgctcttttagcacccgctgcagcagccacaggcccatgatatttttcagcacccgatagcggccttcggctccgccttcgttggtgatattggcctgcagcgccgcgtcgcaggtgtacggcgtcaggctttcaaaccccatcagcgaccaggtgccggaggagagataggcggcatggcggtcggccagcggggaggcgatcaccgcgctggcggtgtcgtggctggcgacagcgactaccggaattcggttaccctgcgggcagatccagtggcctatcacattgccggggtgggtcggctttccgaaccacgccaacggcgcgccggtccagttcagcagcgtctcatcccagctatcgctgttaatattgaccagctgggtggtggtggcgttggtatattcccagttcagattgccggtcaggcggaagctgaaatagtcggggatcagcagggcatgggcagcctgactgaccagctccggctgctgctccaccagcgcgcgcagctgataaagcgtgttaaacggcaaaaactgaatgccgctgcggcgatagatttccgcccggcccagctgcgcttcagcgtgacgcagcaggccctgggtgcggtcgtcacgataggagatcggcagcccgacgcgctggccctgcttatccagcaggacataatctaccccccaggtatcgatgccgatactgtctatcagaatgccctgctcacacactttctccagcccgcggcggatctcgccttccaggctatctacatcccagcagtcgaagccgtctactttctgcagactattggtgaagcgatgaatttcgcgcagcgtcagggcgcgcggcccgggctgatagctggcgagcatcacccgcccgctggaggcgcctaaatcgacagcgacacaatgacgaatactcatgaaacgatccttcttaaaatcattgtccgcagtctaaaaaaggccgtttactgacaccttctcgctacggacagccaaaactggccgctggcaagaaagcaaaggtgaccgtgagggacatcacagtttgcggttttaggggatggcgagggggatgtgatggcctccgcagttccgcatctttccggctgattcttgaaaaagcggcaggatttacgaatttcgcggtcaaaaattgaaggccggatagccaacccttcattactatcagccggtgactgataatttttctcattacgagggtggcatcatgaccatattgcacagtacggatttctttaaggccgggatctcgacggtggctattgaaccccgcctccctcagtcggcctttccggaacatcaccatgatttccatgaaatagttatcgtggagcagggatcgggtattcacgtcttcaatggccagccctacaccattggcggcggttcggtctgttttatccgcgatcacgaccgccatctttacgagcacacggataatctgtgtctgaccaatgtgctctatcgcgcgccggatgcgtttcgctttctcgccggggtcagtcaactactgccccaggaacaggaaggaaactacccctcgcactggcgggtgaatcaaaccgtcctgcaacaggtgcggcatatcgtggcgcagatcgaggccgtggggagcgatacggatactcatgccgtcgccagccgtgagatcctgtttatgcagctgctggtgctgttacgtaaaagcagccttgcggaagaggccaccaacaacgatgcgcggctgaatcagctgttggcctggctcgaagaccattttgcgcaggagatctgctgggaggaggtggcggcgcagttttcgctgtcgctgcgtacgctgcaccgccagctgaagcagcagaccggtctgacgccacagcgctatcttaatcgggtgcgcctgatgaaagcccgccacctgctgcgccacagcgatgaaagcgtgactgatatcgcttatcgctgcggcttcggcgacagtaaccacttttcgacgctttttcgccgggagttcgactggtcgccgcgcgatatccgccaggggcgcgacgccattcttcagtaacgcgagaagagtcaacgtattgcagactaaaaacgcgaataatgcgccgttatccgcgtttggagtgtgagccgtggccggtctgattttacgtaaagaggagtttttcccttccgccacacaggcagtggcggtggcagaccgctacccgcaaaatgtctttgccgaacatacccatgagttctgcgagctggtgctggtgtggcgaggcaacgggctgcacgtccttaacgatcgtccctggcgcattacccgcggcgatctgttctacattcgcgccgaagataaacactcctatgcttccgttaacgatctggttctgcagaacatcatctattgcccggagcggctgcagctcaattttgactgggccggggcgatccctggcctcttcggcacgccgtggaagccccactggcgcatgggcagcacaggtatggcgcaggcgcgccaggtgattagccagcttgagcatgagtgcgcccggcgcgacgcgcagggaaatgcgatggccgaactgctttttgcccagctggcgctgacgttgcagcgccatcgctacgcgacggatgatcccgcggcgacgcagcgcgaagcgctgctggacaaactgctggccgcgctggcggccagccttagccgcccctttgttctggagcgtttctgcgagcaggagggcggcagcgagcgggcgcttcgccagcagtttcgccagcaaaccgggatgaccatcaatcactatttacgccagctgcggatctgccatgcgcagtatctgctgcagcataccgagcgcttaatcggcgatatcgccatgcagtgcggctttgaggacagtaactacttttcggtggtttttagccgggaaatcggcatgtcgccggggcagtggcggcagcgcagtcgcgccgccgcctgaagagcgtcgttgtcaggcagatgatccggtgattaactggccattcccagaccgacgatattggcggcgatgataatcaccacgcagccgaggctcaggacgctcaccggacgacggccggcgttgttccactccttcagcaccagacccaccacaccgccgcacagcacgtagaaactcatgtgcagcatccagctcatataatcatactgcgccggaatgctggcgtggccccaggcatagaagaagaactggagataccacatcagaccgccgagggcggagagcagaaggttgctgatgataagcggtttggccagcgagaaatcggctttgactgacaggttcttcactttcgccagacgaataaagcagaagccaaggttaaccagcgccccgccgcccataatcaccacgtagcttggcagcgctgcgtacagcgggtcgacgccgagcgccgcggcggcatcatgcatcggtttggcggcgttcatcgcgaacgacatccctgcggagaagataccgcacattaccgccagcagaagccctttcttcagattgaactcttcggctttgatgcccattttgcgctctttcagctggcctgcgcgggtgacgatgccgacgccaatcaccgccaccagcacgccgagcagcgtcatttgaccgccctgggtgtgcatcagcactgcaaactgaccgttaataatcggcgtcatcagcgtgccgacaatcagcgtgatgccaatggcgatgccaatccccatcgacatgccaagatagcgcatggtcaggccatagttgatattaccaatgccccacatggcgccgaacagaaagaccggcagcagcgtggaggcgctaaaagagcggtagtaggcccagaagtcgggtaacagcgtggcgctgatggcccagggcagaatcagccaggagacgatccccccgaccgaccacatggtttcccacgaccagtgttttacttttttgaacggggcatagaaacaggcggcactggcggcccctatcaaatgccaaaaaatacccatcgtaatcgcgtggttcattgattttatcctcatctttttttatcggagacggcggcttccgatgggatgagtgtaaaaattggccgctttggccgccttcaggacgttgccacaggatggcgaaccctggcaaccatgggcttaattagttgttctacatcacaaaacgacgggtatttcttctggttatatccatatgaaaaatacggcattgataagcattttcaataccatttaattaactataatggacaaactgcttacgcggcgttaacacttgagccgctcgacaaaaatggagatgattatgagctataccctgccatccctgccttacgcttacgatgctctggaaccgcacttcgacaagcagacgatggagatccatcacactaaacaccaccagacctacgtgaacaatgccaacgccgcgctggaaagcctgccggagttcgctaacctgtccgctgaagagctgattaccaagctggatcagctgccggctgacaaaaaaaccgtactgcgtaacaacgccggcggccacgcgaaccacagcctgttctggaaaggcctgaaaaccggtaccaccctgcagggcgacctgaaagcggctatcgagcgcgatttcggttccgtggagaacttcaaagcggaattcgaaaaagccgctgctacccgtttcggctccggctgggcgtggctggtcctgaaaggtgataaactggccgttgtctccaccgccaaccaggattccccgctgatgggcgaagccatttccggcgcttccggcttcccgattatcggcctggacgtctgggaacacgcttactacctgaaattccagaaccgccgcccggactacatcaaagccttctgggacgtagtgaactgggacgaagctgcagcgcgttttgccgccaaaaaataaggttgcattgcgctaaaagagaagcgagtctgatgactcgctttttttatatctgtagcaaggagagcagccatgcattatccggtgaatgtctttgtcggcaaaatcagggactacgcgggcagtcgccccagcgcgatcgacaaaatccaggtcgacggagaattgcagctcggcgatctcggtctcgatggggaccagcaggcggagaaaaaaatccacggcgggccggaccgcgcgctgtgtcattatccgcgtgaacactatgccgactggatccgtgacttcccccagcaggccgagcggttctgcgcgccggcgttcggcgaaaacctctccaccaccgggcttaccgagcaaaacgtttatatcggcgatatctttcgctggggcgaggcgctgatccaggtcacccagccgcgatcgccgtgcttcaagctcaactttcattttgcgatcaatgatatggcgcagctgatgcaaaacagcggaaaaaccggctggctgtaccgggtgattaccggagggcaagtttccagcgatgcgccgctcgagctggtttcccggctgagtgatgtcagcgttcatgaggccggggcgattgcctggcagatgccgtttgatgatgatcagtaccaccgcttattgtcggcagcgggcctgtctgttagctggagccgaacgatgcagaaacggcgtttaagcggcaagatagaggatagttcgcggagattatgggggaaataatcccccatattaagtattcccggggatgctcccggcgcagcgccgcacagcgcaggccgggtcggcgtcaggttcgtttatatagcggcagccagattgttaaacgcagaccacccagcgggctgtcgtcggccttcacccagccgcggtgctgctgaatagcggtttcgacaatcgccagccccaggccggtgccgccggactcgcggtcgcgcgcctcgtcggtccggtagaatggccggaaaatctgttcgcgatcttccgggctgactcccgggccgtcgtcatcgacgttaaccgtaatcccgtctttatccaccgagaagctgacggaaattttcgtatgcgagtagcgcagggcgttgcgcacgatattctccagcgcgctttccagcgcattagggttaccgtacagcggccatgggcccggcggatactcaacggtgaaagatttccccatctgctcggcttcaaacgccgcattgtccaacacttcgttccatagctgattggctttcaccgtctcgctgaccagggcgtttttcgcctgattgcgcgacatcaccagcaggtcgttgatcatgctgtccagccggtgcgcttcggtttcgatacgctccagctccttgctctctccgctgcggcgacgcagcagggcggtacccaattgcaggcgcgtaagcggcgtgcgcagctcgtgcgagatatcggacagcagccgctgctggctggtcatcatccgctccagggccgtcaccatctggttaaaactggcgccagcggctaaaaactcctgcggcccggcttccagctccggatgctggcgcaggttgccctgggcgacttcatcggcggcatttttcagcttacgcgccggtttcgccaggctccacgccagccacagcagcagcggggcgctgaccagcatcgtgacgatcagcagcagcagcggccggtcaaacagcaggttgataaagtcggattgtgaggtgctggcgggacgaatcagatagagctgatagttatcctccccgtcccggacggaaaacgggcccaccatttccaggcggccatagcgttttttctgcggatgatcggcgttatcggcctggccgataaagttacgaatgatctgcatctcgttgcgttctgcgccgatcacgcggccttcgctggtcaccagcagcaggcgttgtcccggaggcgcccatttatcgatggcgcgaaacaaacgacgccaccacatcaggtcgtttggcggatcgttggccagctcggcctcgacgtgctgctcgatcatgatgccctgacgctgctcgctttccagcagctcggtcatctgccgggaatccagtttgggcaacatcagcaccagcatcaacaccagcgccagcgtgagccagaagatggcgaagatgcgtgcagtcaaacttccaatcatgaagcggaaaccatcagatacccgcggccacgcagcgttttaaaccacggatggccatctttgcgctccggcagcttacgccgcaggttggaaatatgcatatcgatggcgcggtcgaacggcgtcaggcgcttgcctaacacttcctggcttaaatgctcacgggagactacctgaccgagatgctgcgctaacagatagagcagggtgaactcggtgccggtgagctccagcgtctggccatcgaaattggcttcctggcggcccggattgaggcttaaggcatccacttccagggttggtgagccggcttcggtcgtctgctgctgctcgctccagtgggaacggcgcagaatcgcgcgtatacgggccaccagctcgcgatcgttgaatggcttaggcaaatagtcatccgcgcccagctcgaggccgagaacgcgatccagctcgcttccgcgcgctgttagcatgataaccggagtctggtgtgtctgacgcagctctttcagcgtatcgataccgtttttcttcggcatcatcacgtcgagcagcaataaatcaacgctgtcgtccagaagggccagcgcctgttccccatcatgggccaccagcacgttaaaaccttccatatcgagcagctcttttaacagggaggtgagctcccggtcatcatcaactaacaggattttattcattgtttaaatacctccgaggcagaaattacgtcatcaaggcccgctaatccatgactttacgttgttttacaccccctgacgcatgtttgcagcctgaatcgtagactgtctctcgttgaatcgcgacacaaacgttttgggagtatgtgatgcgcaatgttatcgctgccgtcatggcctcaacgctggcgctaagtgcatatagccaggccgctgaagtcgttaccagcgttaactggctccccggagacgaagggggacagcgcggtagccaaagccatatgtttgacggcataagtttaaccgagcagcaacgtcagcagttacgggatcttatgcaacgggcacgccacgacaggctccccgttaatgttagcgaaatggagacaatgcatcgccttgtcaccgcagaaaattttgatgaaaacgctgtgcgcgctcaggcagaaaagatggcgcaggaacaggttgcccgccaggtcgagatggctaaggttcgcaaccagatgtaccacctgcttacgccagagcagcaagcggttttaaatgctaagcaccagcagcgtatggatcagttgcgtgaggttgcaaggatgcagaaaggctcagcgatgatgctttcgagtagtagcaacaccctgcaaccccagtaacaaaccctgttttccttgccatagacaccatccctgtcttcccccacatgatgtgggggttttttttgccctttttacggtaaatcaactccttcgcctatcccgtgagcgtcacaagttcgggttatactaagcgcattgcaggagaaggagcctatatgaatcaatcttatggccggttggtcagtcgcgccgctatcgccgcgacggctatggcctccgcgttacttttgatcaaaatttttgcgtggtggtataccggttctgtcagtattctggctgcgctggtggattcgctggtggacattgccgcctcgctgaccaacctgctggtggttcgctattcgctacagcctgctgatgaagaacatacctttggtcatggcaaagcggagtcgctggcggcgctggcgcaaagcatgtttatctccggctcggcgctgttcctgtttctcaccggcattcagcacctggtgcgtccggagccgctgcaggccgccggcgtcggggtcgtcgtcacattgatcgccctcgttagtacgctggcgctggtgactttccagcgctgggtggtgcgaaaaacccagagccaggcggtgcgggcggatatgcttcattatcagtctgatgttatgatgaacggcgccattctggtggcgctgggcctatcctggtacggctggcatcgcgccgacgcgttgtttgccctggggattggcatctatattttatatagcgcgctgcggatgggctatgaggcggttcagtcactactcgaccgcgccttgcctgacgaggagcgtcaggacattatcaccatcgtgaccgcatggcccggcatccgcggggcgcacgatctacgaacgcggcagtcagggccgacccgctttattcagattcatttggaaatggaagataacctcccgctggtgcaagcccacgtgattgcagaccaggtggagcaggcgattctgcgccgtttcccggggtccgatgtcattatccatcaggatcccagctctgtggtgccagcggcgcagcagggcttttttgagcgttaggttatagtctgtaaactcgatgtaaaaatgtggggcagatcggcattttttgtataaattaccgccgtttggtctgacctgaatcaattcagcttgaggcgtttgatatactattgtcattagcgtcgtgcactcctggtgagggagcgcttcaggcaacagaattattttttgcttcctaagttcagaggtagtcatgattaagaaaatcggtgtgttgacaagtggcggtgatgcgccgggcatgaacgcagcaattcgtggcgttgtgcgcgcggcattaacggaaggtctggaagtttttggaatctatgacggttacctcggattgtatgaagaccgtatggttcagctcgaccgttacagcgtttccgacatgatcaaccgcggcggcaccttcctgggctccgctcgcttcccggaattccgcgaagaacacatccgcgctgtggctatcgaaaacatgaagaagcgcggcctggacgcgctggtggttatcggcggtgacggttcctatatgggggcgatgcgcctgaccgagatgggcttcccatgcatcggcctgccgggcaccatcgacaacgatatcaaaggcactgactacaccatcggcttctttactgccctgagcaccgtggtggaagcgattgaccgtttgcgcgacacctcctcttcgcaccagcgtatctccgtggtggaagtgatgggccgttactgtggcgacctgaccctggcggcggcgattgccggcggctgtgagttcatcatggtgcctgaagtggaatatacccgtgacgatctggtggcagaaatcaaagccggtatcgcgaaagggaaaaaacacgcgatcgtggccatcaccgagcacatgtgcgacgttgacgagctggcaagctacatcgagaaagagactggccgtgaaactcgcgccaccgtcctcggccacattcagcgcggcggttccccggttccttacgaccgcatcctggcttcccgcatgggcgcctatgcgattgagctgctgctgcagggccatggcggccgttgcgtcggcatccagaacgagaagctggtgcaccacgacatcatcgatgccatcgagaacatgaagcgtccgttcaagaacgactggctggattgcgcgaagaaactgtactaagttacgcgccggataaacaaaaggccttctcatggagaaggccttttttatggcggaaggtttattcgatatccagcgggtcttccgacaggatcatcccggtgttatcggcatacagatggtcgccggagaagaaagtcaccccgccgaaattgacgcgcacgtcgctttcgccgatgccttcgccagccgcgccgaccggaatcgccgccagcgcctgaataccaatgtccagttcctcaaggtcgtcaacctggcgcaccgcgccatagaccaccaacccttcccattcattctggacggccagacgcgccaggtcagcgtcaattaacgcgcgtcgtactgagccgccgccgtcgatcaggagaatatgaccacggccattctgctcgagcagatcgtagagcaacccgttatcctcgaaacatttaaccgtaatgatctgtccaccaaacgacgaccgtcctccaaagttagagaacagcggttccacgacgttgacatcttcctggtagatgtcacaaagctcggaagtatcgtatttcataggcttaacgttcagttgctgcgagagtttttagtatatcccgcgaatcgcattgttggcaaaatcatcaattgttaattgatatttgtcagttaagccatcagcttactggcaataattccgataacaaacagcaggttggtcagtaaggcccctttgaccgtcttttcgagcattggccgcatcgccagcggatcggattcgcgcaggacgtagcgcgcctgtttcaccagcagcggcgtggcgagaataaacagccagccccaggctgaatgcagcgccagcaggttaaatagcgccagacacagcagggcgccgagcagcaggcaggcatgatagcggcgggcattgaccgggcccaggcgcacggcgagggtgttcttcccgttctgccggtcgctgtcgatatcgcgcagattattgatgtttagcacggcggtcgccagcagaccgcaggctgtcgccggcagaaaaatggccgcttccacattatgggcttgcagataccagctgccgaggacgctcagccagccgaagaaaacgagtactgagatatcacccagaccaatatatccatacggacgggtgcccaccgtgtaggtgatggcggccacgatagacaggcctcccagggcgaggaagccgatgaaatcgccgacgctctgccaggcggcgcacagcagcgccagaccaaacagacagatcagcacgacggtgacgatcagggcgcgcttcatctgctggggggtaatcacccctttctgcatcccgcgcagcggcccgatgcgatccggtttatcactccccttaaccgcgtcgccgtagtcattggcgaggttggaaagaatttgcagcaagccggcggtgatcagcgccagcagggcaacccagggatcaaaatggccctgctcccaggcaaggacggtgccaacaataatcgcggcaaatgccagcggtaacgttttaggacgcaggctttccagccacgcctgtgaacggctgatatcagtcatagttattttagccaataaaaatgggggcgatagcccccatcaacagtgatgaaaatgcattgcaccggattataggataaaacggctcagatcttcatctgccaccagaacatccaggtgtttactcacatattcggcatcaatagtgacggtctggccgttcatctcgctggcatcataggagatatcttccaccaggcgctccagcacggtgtgcaggcgacgcgcaccgatgttctcggtggtttcgtttacctgccatgcggcctgggcgatgcgcttgatgccgtcttcggtgaattcgatgttcaccccttcggtcgccatcagcgccttgtactgcacggtgatagaggcattcggctcggtcaggatgcgctcgaagtcgtgggtggtcagcgccttcagctcaacgcggatcggcagacgcccctgcagttccgggatcagatcggatgggctggccacctggaatgcgccggaggcgataaacaggatgtggtcggtcttgaccatcccatgtttggtggagacggtgcagccttccaccagcggcagcaggtcgcgctgtacgccttcgcgggagacgtccgggccggaggtgttgccgccgcgcttacagattttgtcgatttcgtcgataaagacgataccgtgctgctctacagcgtcgatggcttcctgcttcagctcttccggattgaccagtttggccgcttcttcttcaatcagcagcttcatcgcgtctttgattttcagcttacgcggtttctgcttctggccgccgaggttctggaacatagactgcagctggctggtcatctcttccatgcccggaggggacatgatttcaacgcccatcggcgccgcagcgagatcgatttcaatctctttatcgtccagctggccttcacgcagttttttacggaacgcctggcgcgctgcagacggttcctgcgacggctcagtctggccccagttgttcttcgccggtgggatcagcacgtcgagcacgcgctcttccgccagctcttccgcgcggtaacggttcttatcgatggactgcatgcgaaccattttgatcgccgcatcggtcaaatcgcggatgatggagtccacttctttaccgacatagcccacttcggtgaacttcgtcgcttcaactttgataaacggcgcgttagccagttttgccagacgacgagcgatttcggttttaccgacgccggttgggccgatcatcagaatgtttttcggcgtgacttcatgacgcagctcttcgttaagctgcatccgacgccagcggttacgcagggcgatagcaacagaacgcttggcggcgtcctgaccgataatgtgtttgtccagttcgctgacaatttcgcgtggggtcatttcagacatgggagatccttacgctttagaaggtaattcttcgatggtgtggaaatggttggtatagatgcagatatcacctgcaatatccaacgctttctcggcgatgtcgcgcgcgcccatatcggtattttccaacagcgcgcgggccgcggcttgggcgtaaggaccgccggagccgatagcaatcaaatcgttttccggctgtaccacgtcaccgttaccggtgatgataagcgacgcgttttcgtccgcgacggccagcagcgcttccagtttgcgcaacatccggtcagttcgccagtctttggccagctcaacggcggccttcaccagatggccctggtgcatttccagtttacgttcaaacagttcgaacagcgtgaaggcgtcggcggtgccgccagcgaaaccggcaatcactttgtcgttgtacagacgacgcactttcttcacattgcccttcatcacggtgttgcccagcgtggcctggccatcaccggcaataacaacatggccgttacggcgaacacttacaattgtagtcacgagcagaccccttggttgcaaaagcggaacaggggccccgcgctgtccgcggggccgaatgcaattatagatgggggggattttgagggtttcaacccctggcggcgagacgaatgcagttcgcgtgtccagccatcttcaggcgggtgatcatctcgttggcgctttctttgcctttcaacgggccaataaccacgcggttccagccgttgttagtggtaatgtgcgaagcaaacccttcgaaagccagctgagcgcggacggtttcggcctgctcggcgcctttaaaagagccgcactggatcatccagctacgatcgtctttcttctcggcggtggttttcggcgcttcttccacccgagttaccggcgccgcggcctgggtacgcggctgcgtggtattggtatgcgctggcgtctgcagcagatcctggtacggctgctggtttgacgcggtctgcttcggttgttgctgctgaaccggcttcggctgctgaacgcgcggcggctgttgttggacggtctgcgcctgagtctgcgcccactgttgctgctgcgcctgctgctgttgctgcgctaaacgctgacgctgaagcgtctgctggcgctgcgccggcgtttgttcgttccacggcacttcggtcagctgggtcggctgctggcgcatatcggcctgcatctgggcgagcagctggcgctgctcgtcggtcagctgttccggtttcatgacttcgccaccggcggtcggttcggtcggcgcgcggacgccaggctggcggctttccagctctttaatatagcgccagcgctcttccggtttgggcggcaagccgttgccggcggcctggcgattttgcatcgcttccgcttcttctttcttatgatgcgtaatgaaatagaggccaccgataaaggccaccagcacagccgccgcgatcgccaccatcgccggtgaaatcgccggaaggctgctttgcttattccttgagcttcgggtcgtgctctttttgcgccgcgaagaagccggttggctgcggcgtacataatctcgttgtgccactatcgtttcgctgtcttatattcgttcgtcagcccgccatgttacttaagcggcgggcctttgaccagaagagcaggcccgaaagcctgatggttatcgtctgattttttgcgtactgccgcgaacaatcagttcgcaatcgagcagacgcgagccgctgttcacgttatgcccctgcatttgctccagtaatagcagcattccttcacggccgatatcaaaccgtggctgtgaaaccgtggtcaacggcggatcgcaaaattcagacaacgcgatgttatcgaagccgacaattgacaggtcgtccggcactttcagaccacgacgttttgccagcgacaaagcgcccagcgccatcacatcgctatggcagaagacggcggtcggcggcaccggctgcgccaggagctgctccagcgcattggcgccggcttcgaaggtaaagttgccgcgagcaatatagtgcggatcgacggtgataccgctgcggcgcagcgcctgcacataaccctgcaggcgataatggcacaacggcatatcttccgggccggcgatacagccgatacgctgatgtcccagctcgtggagataatttaccgcgttaaaggccgccgtcaggttatcgatatggacggtgggcagctccagctccggcgcaaactcattcgacatgaccattggcggcaaattgcgctgctcttccacgctggcgtcaaacggcaagcgcgagctgagcagcaccatgccgtcgatctgcttggtgatgataaggtcgataaaggttttttctttctgattctggtgggcgcaatcgccgattaacaccagatagccgtgctcggcggcagtgacttcaataccgcggatcacttcactaaagaagggatcgcagatatccgggacgatcacgaggatcgtccgcgattcgttgcgcttcatattgcgtccgagcgactgcggtaaatagccgacttccagcgccgcctgctcgacccggttacgggtggcttgcgacaccttatcagggttcatcaacgctcgggacacggttgccgtggaaacgtttgccttgagggcgacgtctttcatggtggcggcaaccacttgttttttgggcttcacctggtttctcctcgctgaatggcgctggcatttcccttgggcgctaactgctgcatcatttttatcagatagtcgcggcagtgagttacagaattttcatgaaaaacgtgatgcttgttaaatttttcgatccggctcgcaagagaaggcttatccttcaatcggatcgacatccagcacccacttcacttttctcgcctccggaagcgtattgatcagcgccagcgtaccgctaacgatatgttgcagacgcacccgcgaaggatgctgcagcaatatttgccagcgccagcggccgccgcgctttggcgccagcgccggaaccggaccgagcacccatagcttttcgtcggccagcgggctggcctgcagcagattgcgcagctgttgtaaaaacagcggcgcctgctggttgttatggtcttccgcacgaatcagcacatggctggtccacggcggcagctgcatcgtctgccgctctgccagcgcctgttcggcaaaggcgtcgtagcctttatacagcagggtctgcagtagagggtgttccggatggtgggtttgaagaatgacctcgccctgttttcctgcccggcccgctcgtccggagacctgggtataaagctgagcgaaacgctctgcggagcggaaatcagcggaaaacagcgccccgtcgacatccagcagggagacgagggtgacgtccgggaagtggtgccctttggccagcatttgggtgccaatcagaatacgcgccccgccgcgatggacggcggcgagatgctcctccagcgctcctttgcggctggtggtatcgcggtcgatacgcgagataggcacctcagggaacagcggcgccagggcctgctccagctgctcggtgccgatccctaccggcaccagatgcgtggagccgcaggaaggacactggcgcgggatcgggcgctggctgtcgcaatggtggcagcgcagatggtgctgcgcctggtgcaacgtatagtaactgtcgcagcgcgggcattccgctatccagccgcaatcgtggcacagcagcgctggcgcaaagccgcggcggttaagaaacaggatcacctggttatccgcttgcaggtgctggcgcatacggctaatcagcgcgggagacaggcccgcctgcagcggttgccctttgagatcgagcacgtgctgctgggccgggcgcgcattgcccgcgcgtttgcttaaggttaactggcggtatttaccctggcggacgttatgcagagtctccagcgccggcgtcgccgagccgagaattatcgggatctgctcgctgtgggcgcgccataccgccaggtcgcgggcatggtagcgccagccttcctgctgcttgtaggagctatcatgctcttcgtcgatgacgatgacgccgagatctttaaatggggtaaacagcgaggagcgggtgccgatcacaatggccgcttcgccatttttcgccttcagccaggccgagagacgttcgctgtcattgagcccggagtgcagcacttccaccggcgcgttaaagcgctggcgaaatcgggcgatggtttgcggcgtcaggccgatctccggcaccatcaccagcgcctggcgcccctgcgccagcacattctccagcacgctcaaatagacttccgttttcccggagccggtaatacccgccagcagccaggcggagaaacgatcggcggcgctgtggatcgccccgacggcggtggcctgctcggtattcaggcgcaggcgttcgccggcaaccgaatacgcgctgcgccagtcggtgagggcgggcgcttcgcaggccagctccgccagccctttgccgcgcagcgcctgcagcgccgcttcattgaattccagttcgccaacctgatgacgccagattttgccctggcgcagcgccgccagcgcctgctgctgcttccgggagcgtttcaggccgttaaggtcgacaacctgcccctgctcggtggcgaaccagtaccacagcggcgtggcgctggcgggtttgccctggcgcagcataacgggtaatgcatggaacagcacatcgccgatcgggtgatggtaatactcagccgcccacatcagcagtcgccagacagtcgtggagaagaccggctcgtcgtccagcgcttcggcgaccggttttagctcatccagcggcagttcgctgcgctcgctcaccgccgcgacaatgccgatccgctcctgtttgccgaacggcacccgcacccgacagcccgctttgaccgccatgccttcaggcagcaggtagtcaaaagtgcgcggtagcggaacgggtagggcaacgtgggcgacggacatgtcatcttcctgacttgaaatctggcgggatagtatacacattacgataaggcggcgcggatcagtttgcatatgctggtcaaattctgtatgattcgccgcctttgatgcgctttatatcgcattgaagattgaccattaccgcgtgcttcacgctgtcagcagcgtagaaggcgacgggaaattactaatatcgcgtggtgtctggcgttagggctggaagagcgacgcggccttaactgaggttctcccatgaaaaaaggtattcacccaaattacgacgaaattactgctacctgttcttgcggtaatgtcatgaaaatccgctccaccgttggtcacgacctgaacctcgacgtgtgcggcaaatgccacccgttcttcaccggcaaacagcgtgatgttgctaccggtggccgtgttgaccgcttcaacaagcgcttcagcatcccgggcagcaagtaagttgccagaagaagccgcctcagggcggcttttttgtctcttccgcctgcctgggcgggaaagaaaaaagggcggaagattattccgccctttttatcgtctcagtattcccacgtatccgggtcgattcccagttcacgcataatcgctttcgccgcttccgggatctcatcgctgcgctctttacgcaggtcttcatcgttaggcaacggttgtccggtaaaggcatgcagaaacgcttcgcacagcagctcgctgttggtcgcgtgacgcaggttattcacctgacgacgcgtgcgttcatcggtgaggatttttaacaccttcagaggaatggaaaccgtaattttctttacttgttcactcttcttaccgtgctcagcgtatgggctgatatattcgccgctccattcagccatgagataccttaatcctctgtttattagtgaagggccagaatattccgcccgggctataattgcgcgtagtttaccgtatgcgcgggctttctgacatgagataagccgccgacgacgtgcgctaatgcatataattttaacggctatttgcactttgctcaatctatacgcaaagaagtttagatgtccagatgtattgacgtctattgtgacaatgattactctggagcctgacttttcaccgattcagcccaggaacttcccaacatgacgcgtaaacaggccaccatcgcagtgcgtagcggtttaaatgacgacgagcagtacggttgcgttgtcccgccgattcacctctccagtacctataacttcaccggctttaatgaaccgcgcgcccacgactactcccgtcgtggcaatccgacgcgcgatgtggtgcagcgcgccttagcggagctggagggcggcgccggcgcggtgctgaccaataccggaatgtcggcgatcctgctggtgacgacggtgttccttaaacctggcgatctgctggtggcgccgcacgactgctacggcggcagctaccgtctgttcgacagcctggcgaagcgcggctgctatcgcgtccagtttgtcgatcaaagcgatgagcaggcgctgcgggcggcgctggcggaaaaaccgaagctggtgttggtggaaagcccaagtaatccattgctgcgggtggtggatattgcgaaaatctgtggtctggcgcgtgaggccggggcaattagcgtggtggacaacaccttcctgagcccggcgttgcaaaacccgctggcgctgggcgccgatctggtgctgcattcctgtaccaaatacctcaatggtcactccgatgtggtggccggggtggtgattgccaaagatccggcaactgtcaccgaactggcatggtgggcgaataatattggcgtcaccggcagcgccttcgacagctatctgctgttgcgcgggctgcggacgctgtctccacggatggaagtggcgcagcgaaatgccctggcgatcgttgagtatctgaaaacccagccgctggtgaaaaagctgtatcatccatcgctgccggaaaaccaggggcatgaaattgcggcgcgtcagcaaaaaggttttggcgcaatgttaagcttcgagcttgacggtgacgagcagacgctgcgccgttttctgagcgggctgtcgctgtttacactggcggaatcgctggggggcgttgaaagcctgatttcccatgcggcaacgatgacgcatgccggcatggcgcctgaagcgcgtgccgccgccggaatttcagaaacgctcctgcgtatatcgaccggtattgaagatggtgaagatttaattgccgacctggaaaatggcttccgggcagcaaacgaggaataaagatgagtgtgattgcgcaggcaggggcgaagggtcgtcagctgcacaaatttggtgggagtagtttagcggatgcgaaatgttacctgcgcgtcgcggggatcatgaaggagtattcgcaggcgggggatatgatggtcgtctccgccgctggcagcaccaccaaccagctgatcagctggcttaagcttagccagagcgatcgccttgctgcgcatcaggttcagcagtcgcttcgccgctatcacaccgagctgattggcggtctgctggagcctgcggcggcggatacgttgatagccgcctttatccacgaccttgagcgtctggctggtctgctggacggcggggtttccgaagcggtctatgcggaagtggtcggccatggggaagtgtggtccgcgcgcctgatggcggcggttctcaaccagctgggtatggaagccgcctggctggacgcgcgcgcgttcctgcgcgcggaacgcgccgcgcagccgcaggtggatgaaggattatcctatccgctgctgcagcagctgatggcgcagcatcctaacaaacgtctggtggtgaccggctttatctcccgtaaccaggccggcgaaaccgtcctgctgggccgtaacgggtctgactactctgccacccagatcggcgcgctggcgggcgcctcccgggtcactatctggagcgacgttgccggggtgtacagcgcggatccgcgcaaggtgaaagacgcctgcctgctgccgctgctgcgtctggacgaagccagcgagctggcgcgcctggccgcgccggtgctccatgcccgcacgctacagccggtttccgccagtgatatcgatctgcagttacgctgcagctacacgccggaacagggttccacgcgcattgagcgcgtgctggcctccggtaccggcgcacggattgtcaccagccatgacgacgtctgcctggtggagttccaggtgccggccggtcacgatttcaaactggcgcataaagagctggacgctctgctcaaacgcgcccagctgcgcccgttagccgttggcgtccatgccgaccgtaagctgctgcagttctgctatacctccgaggtggccgacagcgcgctgaaattgctcgatgaagccggtctgccgggcgagctgcgtctgcgtcagaagctggcgctggtggcgatggtgggcgcgggagtcacccgtaacccgctgcactgccaccgtttctggcagcagctcaaagggcagccggtggagttcacctggcagtctgaagaggggatcagcctggtggcggtgctacgcgccgggccgacggaaagcctgatccaggggctgcatcagtccttgtttcgcgccgaaaagcgtattggcctgatgctgttcggcaaagggaacattggttcacgctggctggagcttttcgcccgtgaacaaactacgctctcggcgcgtaccggtttcgagtttattctcgctggcgtagtcgacagtaaacgcagcctgctgaattacgacgggctggatgccagccgggcgctggctttcttcaacgatgaagcggtggagcaggatgaagagtcgctgttcctgtggatgcgcgcgcacccgtatgatgatttagtggtgctggacgtcaccgccagcgaacagctggccgaccagtatcttgatttcgccagccatggcttccacgtcattagcgccaacaagctggcgggcgccagcagcagtgataaatatcgtcagatccacgacgcgtttgagaagacggggcgccactggttgtataacgccaccgtgggcgccggcttgccggtgaaccatacggtgcgcgacctgatcgacagcggcgatactattctcggcctgagcggtatcttctcgggaacgctctcctggctgttcctgcagttcgatggcaccgtgccgttcaccgacctggtggatcaggcgtggcagcaggggctgaccgagccggatccgcgcgtcgatctgtccggtaaggatgtgatgcgtaagctggtgatcctcgcgcgggaagcgggctatgacatcgaaccggatcaggtgcgtgtggaatcactggtgccggcgcactgtgaagaggggtcggtcgatcacttctttgagaatggcgaagagctgaacgagcagatgctgcagcgtctggaagcggcccgcgagatggggctggtgctccgctacgtggcgcgctttgatgccaacggcaaagcacgcgtcggtgtggaagcggtacgcgaagagcacccgctggcggcgctgctgccgtgcgataacgtgtttgccatcgaaagccgctggtatcgcgataacccgctggtgatccgcgggcccggcgccgggcgcgatgtgaccgccggggcaatccagtcggatattaaccgcctggcgcagctgctgtaagcgtcgcgttatactcttgaaccagtgaggccactatttgcgttacgcgccctgcggaatacagggcgctctgcgcaaacgcgggtctgtttttcagccatattgtaaaccgtcggctggccgcaaggtctggtagaaaggcgttctcttctgcagtgccgacaagccggcagaccattttctgattctcttcctgcgtccaacgctgccatgaattttgccaccagccatgatgggttttcccctgtagctgccacggagccgggctggctgggttccttatctcttcttccacataccatagatcgccttgccgctgacgaaaaagcggcgcccaggcaacgatcgccgcgccgcgtaaaaagcattcatgcgcaataacgtgcgttttcacctctggaaaccgctggctgagcagtttgaaatgaccgtgtgcggcgataaccgggcgcaatatattgccgcgggcatggcgcttttgcattgcgctgccgtactggatttcatcgaactgactgcgttgtaaaaagcgcatttcagtgagagaaatacgttgaataatatcgtcagtctcctccctgtcggcttgtccgccgcgccagcgatagcgtaatgattcgcctaccgcgaaaggagtgaaattagaggtaagatgaataacattaccgcgcacggcatcaaagcttaataaaaaatagagcttttgcccggcggcattaccctggaatggcgctatcaacggtacgctgcaaatacgtcgtggggcttcaattggggcgatgtgtgggaattttggcgtccagacctttttacagtggcggcactgaaggcgttgcgtaccctgcggattgcggccgtagcgaataatatcccgctgatagcataccgggcaaaaatagccgtagcggcgggcatgatccgtcagataagccaccagccaggggcggaattcccgttcgttaaacagggggggatagctgccgcaggctgcgcagtagagcgccgggtagcccagccgaaaattcgggaaatgatactcagccgcagacggtaaacctaaattgcggcagccaaaagttttacaggcattaatggtaaagagagtatccactggcaggtcaataccaacgatttttacaggtcgttaattttgtcctgctcaggttgcatacaactgtgaatgctctcacataaaaaagtctttcagaacgtaacttagcggttctttatcactctgaaaggaactccgatgaaactaaaagcaatgagcgcagcacttctgttgactttgcctttctgggcctgcgccaaagatgtcaccataatttataccaacgatcttcatgcccatgtcgaaccttataaagtgccatggatagcggatggtaaacgagatattggtggttgggcgaatatcacgacgatggtgaaacaggaaaaagcgaaaaataacgcgacctggttttttgatgccggggattattttaccgggccttacatcagtagcctgacgaagggcaaagcgataatcgatattatgaatacgatgtcctacgatgcggtgactatcggtaatcatgagttcgatcacggctgggataatacgttgcttcagcttagccaggcgacattcccgattgttcagggcaatattttttatcagaacagcgataaatcgttctgggataagccctataccattatcgaaaaagatggcgtgaaaattggcgtgattggcctgcacggcgtgtttgcttttaatgacaccgtttctgccgcgacgcgagtgggtatcgaagcgcgcgatgaggtgaaatggttacagcattatatcgatgaacttaacggtaaagtggatctgaccgtggccctgatccatgaaggcgtcccggcgcgtcagtcgagccaggggggaaccgatgtgcgtcgtgcgctggataaagatattcagactgcgggtcaggtgaaaggcctggacgttttaattaccggccatgctcacgttggcacaccggagcccattaaagtgggtaatacgttgattctttctaccgatagcggcggcatcgatgtgggtaaactggtgctggattatcaggagaaaccgcaccaattcacggtgaagcactttgagctgaagacgctttatgccgatgagtggaagcctgatccgcagacaaaacaggtcatcgacggctggaataagcaacttgaccaactggtgcagcaggtcattacacaatcgcccgttgaactgacccgtgcgtatggcatctcttcgccgttgggcaatcttgccgctgacgccttgctgttggcagcaggtaggagtacgcagatggcgttaaccaactcgggcgggatccggaatgagatccccgccggggcggtgagcatgggcgccgttatcagcaccttcccgtttcccaacgagctggtcatcatggatctaaccgggaagcagttgcgtagcctgatggagcatggcgccgggttgagcaacggcgtgctgcaggtctcccggggactggaaatgaagtatgacagcagcaaacctgtgggccagcgcgttgtgttattcaggctaaacggtaaaccgattgacgatacgacggtttaccatattgccaccaacagcttccttgcagatggcggcgatggttttgtcgcgtttaccgaggggcaggcgcgtaatacctccggcggctattacgtttcaaatgcggtcgtagactatttcaaagccgggcaaaagataacggatgagcagcttaacgggcagcgcgttgtcgatgtgaagaaataagtttttaaggccgggcagtcagcccggccttaagcgatcagtgggccgcaaataccgccctggcggcaaacaggccgttgagggccgccgggaatccggcatagactgccatctgcatgatcgcttccgtaatctcctcttgcgtcaggccgacgtttaatcccgcggcaatgtgtactttcagctgtggctcggcgttacccaacgccgtgagcgcggcgatggtggcgatttcccggctgcgtaaatcgagccctggcctggcgtaaatatcgccgaaggggaactcaatcagatagcgggcgaaatcgggggcgatatcccgcaggctgtcgacgacggcttccccgcccttaccatccacccgctgaagcatttcctgaccgatgatgtaacgttcgctggacatcgttttttcctctctgtgatggtgcgttaagaggaagggtagggaagtgtgccggacttgagtaatacccttttcgtgataccttttcagtatgacaacttcgcgattacattccctggatattcgcctgctgcgcgcctttgccgtggtagcggaggaaaataacatcagccgggcggcgcagcggttatttatctcgcagccgccgctgacccgccatatccgccatctggaagcgcagctgggggtgacgctgtttcagcgccatagcaaaggcctgatcctgaccgacgcaggtagagaggtgctggagatgattcaacctcttctggcgctccaggaacgcacgctggcggcattgagtgagctcgccgcccactcgccgcaggctctacgtctgggcgtgacgacggccttcgaacagggcattttcgccgccgttgaggctgcgctgagcgaacatacccgcgcgttgcatatcacccgccacgcctcaccggcgctggctcagcaggtacgcaaaggcaaactcgatgcggcgctggtcgcgttgccgctcaatactgaagggctgcacctgcacccattgccgtatcatgagccgctcattgcggcattaccggcctcctggccggaagccgccaggccagggctgacgttaagcgcgctcaatcatcggccgctgttctggtttaaacgcgagcgtaatcctggtttctttgactacacgcgccgtattttcgaccgggctggctatgccccgacgtatgtggaagagccggccgagcatgatgtgctgctggcgcgtattgcgcgcggggaaggcatgatcctgctgccggcgtccttttccgcgattcagcgtcagggggtggcgttctgcccggtggctgagggcggcgcgatgccgttaagccttggggtgatttatccgcctcaccaggcagagtccgtgcagcaatggctttctctgctggatggcattctggcgactggctagtctcaggctgactcgcgagccaccttatattgcccaccgagccgcttcctgagcgtggccaggtgatcggaagatgaacttttttcatgtaggtgacctattcctcactctttacgcagatttttctattgacgcccgcgcgcttttccgtcatttttacatctggacgtctaaacgtatagaagttcgcaatataacagccattacatgcgattgatgaggtaaggtatgagcttttttcacgccaatcagcgggaagccctgaatcagagcctggcggaagtccagggccagattaatgtgtcttttgaattctttccgccgcgcaccagtgaaatggagcaaaccctgtggaaatccatcgatcgactgagcagtctgaaaccgaagtttgtttcggtaacctatggcgcgaactctggcgagcgcgatcgcacccacagcatcatcaaaggcattaaagagcgaaccggtctggaagcagcgccgcacctgacctgtatcgatgccagccgcgatgagttgcgcactatcgctcaggattactggaacaacggtatccgccatatcgtcgccctgcgcggcgacctgccgccgggcagcggtaaaccggatatgtacgccgccgatctggtgacgttgctgaaagaggtaggcgattttgatatctctgtcgccgcgtatccggaagtgcatccggaggcgaaaagcgcgcaggcggatttactgaacctgaagcgcaaagtagaagcaggggccaaccgcgcgatcacccagttcttcttcgatgtggaaagctacctgcgttttcgcgatcgctgcgtctcggcaggcatcgacgtggaaatcattcccggtatcctgccggtctccaactttaaacaggcgaaaaagtttgcggatatgaccaacgtccgtatcccggtgtggatgtcaaaaatgttcgaagggctggataacgacgccgaaacccgtcaactggtgggggcgaatatcgccatggacatggtgaagatcttaagccgggaaggggtcaaggatttccacttctacaccctgaaccgcgccgaaatgagctacgccatctgccatacgctgggcgtacgcccggcctgagttttcattaacgtttagtgcgatggcgaagccggtattcgccatcgcttttttttgcccaaaacgctgatacaggtcaggggagagcagaagataaagcgcgtatagtgccagcctgataattgacagggatgggttatgcaatggcaaggaagagcgatccactggcgtttggtgggttggcgttattaacgctgatctggagctttagctggatcgcgatgaagcaagtgacgagctatatcggcgcttttgacttcacggcgctgcgctgtatttttggcgccgtggtgctatggatagtgatgttgatccgcggtaaagcgctcaagccgacgcctttcggctacaccctggcgatcgcgttattgcaaacctgtggcatggtcggtctggcacagtgggcgctaatgagcggtggcgccggtaaagtggcgatcctgagttataccatgccattctgggtagtggtgatggccgcgttattcttaggtgagcgcatgcggcgatggcagtatatcgccatcggggtggcatgcgtgggcctgatactcgtacttcagccttggcaactcgattttacctccctgaaaagcgccttgctggcgatcctctccggcgtgagctggggggcaggtgcgatcgtcgcgaagcgtatgtatacccggtatccgcaggttgatttgctggcgctaacgacatggcagatgctatatgccgccgtagtaatgagcgtagtggcctggctcgtcccgcaacgggcggtagactggcagcccgacgttttctgggccctggcttacagcgcaatccttgcaacggcgctggcctggagtctgtggctttttgtactgcgtaatttaccggcaagtatagccggtctgagtacgctggccgtaccggtctgtggcgtgctattttcctggtggctactacatgaaaatccaggaaaggtggaaggttgtggcattgcgttgatagtactggcgttggcgatgatcagtatcaagagacgaggggcatagcctgctccggcctgcagagatgcataaaaaacacccggctgacgccgggtgttttgctctggtttattcccattcctgcaggaagcgctgaccatactggtcggccaccagcagcgcggcgtagacctggtcggaatcaacgccgcccggcatattgtgaatggtttcgccttcagcgcaggcggcttccgccaccagacgcattttggtcgggatatcacctttgatatccagctgcgccagggtgatcggcagcccaacgctgtggcacagcgcggcgacggtctctatttcgtccaccggcgcattttccagcaccagctgcgtcagggttccgaacgccactttttccccgtgataatagtgatgggcgtcagggatggccgtcatgccgttatgaatcgcgtgcgccgccgcgagaccaccgctttcgaaacccacgccgctcagataggtgttggcttccaccacccgctccagcgccggggtgaccacgtgctgttcggcggccagcatcgctttttcaccctcttcgagtaaggtgttgtagcatagctcggccagcgccagcgccgcctgggtgcacttcccgcccgccatggtggtggcgccgctacgggagcaggcgcgggcttcgaaccaggtagccagcgcatcgccaatcccggcggccagcaggcgggccggcgcgccggcaacgatctgcgtatcgacaatgaccatgttggggttgcgcggcagcatcaggtagctgtcgaattccccttcgtcggtgtatatcaccgacagcgcgctgcacggcgcatcggtggaggcgatggtgggggcgatcgccaccggcacattcataaagtgggccagcgctttcgcggtatccagggttttgccaccgccgatccccagcacggcggtgcacttcgcgttgccggcgatatcgcgtagacggttgatttcattatgcgaacactcaccgccaaacggcgcgatttcggccgccaggccagcgtcggccaggcttttacgcagcatctcttccgcaaaccccaggacgaacttatcaccgaccaccagccagcgctcggccagcggtttcagatagtcgccgaggcgcttgatggcgcctgcgccctggatatatttgcctggtgattgaataatgcgatccatttcgattcctcctcgatgaccgtgacgccgcccgcaggcggctcgcggatccggttacagattcagcgtgccaaaggcgttattccagtcctgttcgaacttctctatggctgactctaccgcaggggtgccgagcatttgttgcgctacatctagtggaagggtgattgcttcgcagccagccagcagacaatccagcgcctggcgtggcgttttgaagcttgccgccagaactttgctctcgggcgcatgcatttccagcagggattgcagctcctgcaccatgcggatgccgtccccgccctgggcgtcgacgcggttaacgtaaggcgcgacgtactttgcgccggccagcgcggccagcaggccttgcgaagcgctgtagacggcggtgccaagggtcgggatgccttctttcttcagcagtttgatagcggcgagcccttcggcggtgaccgggattttgaccacaatgcccggcacggcattgctcagacgtttggcctcttccaccatgccctgcgcgtcgcggctcatggtctgcgcgaagagggtgccctccggaccgacggctttttgcaggcgcggcagcacatcccagaccgggactttaccggcggcgataatgctcgggttagtggttaccccggccagcgggtagatgcgggccaggcgttccacttcggcgacgttggcggtatccagatagagttccattgtgttttcctcaatgcttaattcggtgctgtcgttgaggtaagcatacggctttcgttcgaaggatcgccagatgacaaatttgccaaaaactggataaatgtacgcatcgtgattaaggatgatttagatcacatttatcggcgctggctgggatgggaggttactatagcgcgcacaaaagtcaggtttaacacacaaaaatctagttttttaccggggatgctttttccgtcagctggctatggtactggcggcggtattcagacggcgagcgttccgtagttttgcggaacaggcggcagaagtagttgctgtcggcgaagccgcaggcgtgggcgatgtctttcactttcatatcgtggcccttcagcagcatacgggcctgttcgagacgaatatggtttagatattcattgaagcccattggcccacatttctggaacagatgggaaagatagttgggagagaggtagaacgcctgggccaccgattcccggctcagcggttccgcataatggatgtccatatattggcggatcgcttcgaacaacgcctggctgcgcgaggaggtttgcgcctggctgccgagaagatcatggcagtggctgagcaggctgacgacgatgctgcgggcggtttgctgctcctgcggttgcatccggagttcattgagcgcctgcagcagaaatgatccgacgcgcggcccgcggcgcagcgcctgctgcttgtcgacaacagttatcgccttgccattccagtgctgcagcgagcactccagctgctgcttagcgaacaggatgcttaacagcaggcagggcgcttgccactgcgggcagttccagctatcgccaggaatatagagcacgtcatgggcctcaaggagcggggcgttatcgccgagggcctggtcgggcaactgcccatcaaggagaatattcagacggggaaaatccacctgcaccaccggctcagcaggcgagcgcgtctcgccggcgaaataaacccggccgaggctggtctgcttttttagcaatgcatcaataagctgattgatatcgttgtccatcattcttccgttcagcgcatcacccttttcatcataccggacattattccagcggtaaaagcgcttgcctgtcgctcttgcctcccagataagatatgttatatcgtaacaatttgtcgccattgatagcaaactcaggagagagtaatgaccagaaagatccccctgctggccttaggattcggcatggctttagccagcgcccaggcgttcgcccacggcaaccatagccatggcccggcgttaaccgaagtggagcgtcaggccagcgaaggcatttttgcggataaagatgtgcaggaccgcgcgctgagcgactgggaaggcgtctggcagtcggtgaacccgtatctgctcaatggcgatctcgatccggtgctggagcagaaggcgaaaaagcccggcggcaagagcgtggaggagtatcgcgcctattataagaagggctacgccaccgatgtggagcagattggcattgaagatgacgtgattgagttccacgttggccagaccgtcaatagctgtaaataccgctattcaggctataaaattctgcattacgcctccggtaagaagggcgtgcgttatctgttcgagtgccagcagggcgatgccaaggcgccgaaatttgtgcaattcagcgaccatatcattggcccgcgtaaatcacagcatttccatattttcatgggcaatgaatcacaggaggcgttgctgaaagagatggataactggccgacctattatccgtatgcgctgcataaagaacagatcgttgatgagatgctgcaccactagaacgggcggaaaacccccggccgggcggccggggagagatagattaaccggtgttacgcataccggcggcgacgccggcgatggtgaccatcagcgcttgttcaacgcgcggatccgggtccttgccctcttcttcagcctggcgtgaacggtgcagcagttccgcctgcaggacgttcagcgggtcggtatagatattacgcagctggatagactcggcgatccacggcaggtcggccatcagatgggagtcgttggcgatggccagcacgacgttgatatcggcagccagcagcttgcgcagctcggaacccagcgcccacagctccggcttcaccaggcgctgatcgtagtactccgccagccacaggtcggccttcgagtaaaccatctccagcatgccgaggcgggtagagaagaacggccagtcgcgacacatggcttccagttcactctgttttccaccttcgaccaccttctgcagcgcagcgccagcgcccagccaggccggcagcatcaggcggttctgggtccaggcgaagatccacggaatggcgcgcagcgactcgacgccgccggttggacgacgttttgccggacgcgaacccagcggcagtttgcccagctcctgctccggggtcgcagagcggaagtaagggacgaaatctttgttttcacgcacgtagccgcgatacatcttgcacgacacgtcggacagctcggccatgatgtcgcgccattctgctttcggctccggcggcggcagcaggttggcttccagaatggcgctggtatacagcgacaggctgctgatggtgacttccggcaggccgtacttaaagcggatcatctcgccttgctcggtaacgcgcaggccgcctttcaggcttcccggcggctgcgagagcagcgcggcgtgggccggcgcgccgccgcggccgatagagccgccgcgaccgtggaacagcgtcagttcaataccggctttttcgcaggttttgatcagcgcgtcctgcgcctggtactgcgcccaggaggcggccatcacgccggcatctttagcggagtcagagtagccgatcatgaccatctgcttgccctggataaagccgcggtaccagtcgatattcagcagctgggtcatgacgtcgttggcgttgttgaggtcatccagcgtttcgaacagcggggccaccggcagagcaaagccaatcccggcttctttcagcaggagatgaaccgccagcacatcggacggcgttttcgccatcgagatcacgtaggcggcgatcgatccgcgcggcgcctcggcgatcaccttgcaggtgtcgagaacttcacgcgtctcttcgcttggctcccactggcgcggcagcagcggacgtttggaattcagttcgcggatcaggaaagcctgtttgtcggcttccgaccagctttcgtagtcgccgatcccgaggtaacgggtcatttcacccagcgcttcggtatggcgggtgctttcctgacgaatatcaatacgcaccagcggtacgccgaaagacttcacgcggcgcagggtgtcgagcagttcgccgttggcgataatgcccatgccgcaggcctgcagcgatttatagcaggcgtacagcggctcccacagctgctcgttctgagtgatcagtcccgccggtttcggcagcttctgacctttcagacgcgcttccagccaggcctgggtctccatcagctgagagcgcagttttttcatcagataacggtacggttcctgagcgccctcggcgccagccagggcgcgcagctcgtcggtacactccaccatcgacagctcagagatcagcacctgcacgtctttgaggaacaggtcggtcgctttccagcggctgagcagcagcacgtggcgggtgatgtcggcagtcacgttcgggttgccgtcgcggtcgccgcccatccacgaggtgaaacgcaccgggacgaagtccaccggcagctgatagccaaggttggcttccagctgttcgttcagctcgcgcagatagttaggcaccccttcccataggctgttttccaccaccgcgaagccccatttggcttcatcgaccggggaagggcggtgcttacgaatttcatcggtatgccacgactgggcgatcagctggcgcagacggcgcattagctgatggtgctcgtagtcagcgatatctttgttgtccaactgcttaaggcagttgttcacttccaccattttatggatcagcgtccggcgggtgatctcggtcgggtgggcggttaacaccagctccagagacagcgattccaccgcttgtttgatggtctcttcgttgagattgggttggtctttgagctttctcagggtacgcgcaatgacttccggattgctggccgcttcgccattcgccgaaatgctgtggtactgctcagcggtgttggccagattcagaaactggctgaaggcacgggccaccggcagcagttcgtcgtttgacaaattctgcagcgtggtcagcagctcctggcggttagcttcgttgccggcgcgtgaagatttggacaacttacggatagtttcgacacgatcaagaatattttctcccaatgcatccttgatggtatcgcccagcaccttgccgagcatactgacattactacgcaatgcggaatattgttcgttcatgttaccccagacaccccatctcattttattttgttatatccgctgcgctggaacgtgagcaacggataagcaacccgtcttttataaagccacgtaaatacccccacgtcaattactgcgaaatcgcttcagcaaacgagtaaatcgccgtaatttgcgaaatttaattcagggagcgctggataagcatcgcttatggaaatgtgacgatcgtcaccgttccgccccgggagaacggggcggaaaaagagggcgattttagtgccagcagaagtgatgaaccacctggctaatcagctcccgggtcggcttgataaaacgcgtctccagatactcgtcaggctgatgggcctgattgatggagcccgggccgagaaccagcgtcggacacagcgtctggataaacggcgcttcggtgcagtaattcaccacgtcggtctgcgcgccaagcagtttctcgaccacctgcaccagcttatggtccggcgggcactcgtagccggggatcggcggatgcagctcagagaccgtcaggcggcccggccagcgttcgctgaccggggccagcgcctcgcccaacagaccattaagatcgtttagggtcatccccggcagcgggcggatatccatatgcagttcacagcaggcgcagatacggtttgaggcatcgccgccatggatagcgcccaggttgagggttgggtaagggaccgtaaacgcctcgaagtgatagcgctctttaagcagatcgcgtaactgcataatccggccgatggcgtcgtgcatcagctcaatcgcgttgaccccgcgcgccggatcgctggagtggccggactggccctgaatacggatcgcgttggacatatggcctttgtgggcgcggatcggctgcagggaggtgggctcgccgatgatggcgcagtccgggcgcagccgggtggtttcggcaaagtagcgcgcgccggccatgctggtctcttcgtcggcggtggccagaatatacagcggctttttcaacgtggtgacgtcgacatcgcgcagggcgtcgagaataaaggcgaagaagcctttcatatcggccgtgccgaggccgtagagcttgttatcgtgttcggtgagggtgaacgggtcgcgcgtccagcggccatcatcgaacggcacggtatcggtatgcccggcgagcagcaggccgccggcgccgtgtccggtgctggccagcaggttgaatttatggcgcgtatccggcaccggctgtatctcaacattgaagccgagatcgcggaaccagcctgccagcaaattgattaaagactcattgctttgatcgagagcctcttcggtcgcgctgatggacggtgtggcgatcaacgcgcggtaaatctcgataaagggcggtaaattgtttttcattgttgacacaccttgggtcgtgatagtatcaatattcatgcatttattgtgaataaaaatacaatatcgttgagcgtaagaaaacccatcgaatgtaaggagatgcgcttccaatgttaaatacgctgattgtgggtgccagtggttatgccggcgcagagctggtgacctatatcaatcgtcatccgcatatgaacataaccgctttgacggtctccgcgcaaagcaatgatgcgggaaaattaatttccgacctgcatccgcagctcaaaggcattgtcgatatgccgctgcagccgatgtccgatatcagcgaattcagcgctggcgtggacgtggtgtttctcgccaccgcgcacgaagtgagtcacgatctggcgccgcagtttcttgccgctggctgcgtggtgttcgatctctccggtgccttccgcgttaacgatggggcgttctacgaaaaatattacggtttcactcatcagcatcccgacctgctcaaacaggcggtgtatggtctggcggagtggagcgcggatgcgcttaaagacgcgcagttaatcgcagtgccaggctgctatccgacggcggcgcagctgtcgctgaagccgctgattgaggccaatctgctggatctcaaccagtggccggtaatcaacgctaccagcggagtgagcggcgcgggtcgtaaggccgcgatcggcaacagcttctgtgaagttagcctgcagccgtacggcatatttaaccatcgccatcagccggagattgccagccacctcggggcaaaggtaatttttaccccgcacctgggtaattttaagcgcggcatcctggaaactattacctgccgcctgaagccgggcgtcggccatgcgcagatcgcggcggtttaccagcaggcttacgccgataaaccactggtacgtttatatgataaaggcgtgcccgctttgaaaagcgtcgaaggcctgccattctgtgatatcggttttgccgtgcaggacgatcatctcatcgtcgtcgcggcagaggataacctgctgaaaggcgccgcagcgcaggcggtgcagtgcgcgaatattcgtttcggcttcgctgagacgcagtctcttatttaaggtgtgatgatgaacccattaattatcaaacttggcggcgtattactcgatagcgaagaagcgctggagcgcctgtttaccgcgctggttaactaccgtgaagcgcaccagcgtccgctgattatcgtccacggcggcggctgcgtggtggatgagctgatgaagcagctcaacctgccggtgcagaagaaaaatggcctgcgcgttacgccggctgagcaaatcgacatcatcaccggcgcgctggcgggaaccgccaacaagacgctgctggcgtgggcgaaaaaacatggtatttcctcggtaggcctgttcctcggcgatggcgatagcgtgaaggtgacgcagctggatgctgagctgggccatgtcgggctggcgcagccgggctccccggcactgatcaacaccctgttggccggcggttacctgccggtggtgagctctatcggggtgaccgatgaaggccagctgatgaacgtcaacgctgaccaggcggcgacagcgctggcggccaccctgggggcggatctgatcctgttgtctgacgttagcggtatcctcgacggtaaagggcagcgcattgccgagatgaccgccgagaaagcggaacagctgatcgagcaggggattatcaccgacggcatgattgttaaagtgaatgcggcccttgacgccgcacgtgctctgggtcgtccggtggatatcgcctcctggcgtcacgccgagcagctgccggcgttatttaacggcacgccgatcggcacacgtattctggcttaagatttcatgcccggcggcgcgtcgtctgccgggcttacaagaccgtaggccgggcggcacaatgccgccggcggaactaacgaataaaggaagcatgttatggcactttggggcgggcgttttacacaggcagcagatcaacggttcaaacagttcaacgactcgttgcgcttcgactatcgtctggcggagcaggatatcgttggctctgtcgcctggtcgaaagcgctggtaacggtcggcgttctgagtgccgctgaacagcagcagctggaagaagcgctgaacgtgctgctggaagaggtgcgcgccaatccgcagcaaatcctcgccagcgatgccgaagatattcacagctgggtggaaggcaagctgatcgataaagtgggccagctgggcaagaaactgcacaccgggcgcagccgtaacgaccaggtcgccaccgatcttaaactgtggtgcaaagataccgttgtcgaactgctctcagcgaaccgccagctgcagagcgcgctggtggagaccgcccagcagaatcaggacgcggtaatgccggggtacacccacctgcagcgcgcccagccggtgacgttcgcgcactggtgtctggcctacgttgaaatgctggcgcgtgacgaaagccgtctgcaggacgcgctgaagcgcctcgacgtcagcccgctgggctgcggcgcgctggcggggacggcgtatgagatcgaccgcgagcagctggccggctggctgggctttgcctccgccacccgcaacagcctcgacagcgtgtccgatcgcgatcatgtgctggagctgctttccgatgcggctatcggtatggtgcatctgtcgcgctttgcggaagatctgattttctttaactccggcgaggcgaacttcgtcgagctttccgaccgcgtgacctccggctcctcgctgatgccgcagaagaaaaacccggacgccctggagcttatccgtggcaaatgcggccgcgtgcagggtgccctgaccggcatgatgatgacgctgaaaggactgccgctggcctacaacaaagacatgcaggaagataaagaggggcttttcgacgccctggatacctggctcgactgcctgcatatggcggccctggtgctggacggcattcaggtaaaacgcccgcgctgtgcggaagcggcgcagcagggctatgccaacgccactgagctggcggattatctggtggcgaaaggcgtaccgttccgcgaggcgcaccatattgtcggtgaagcggtagtggaagccattgcgcaagggaaaccgctggaagcgctgaccctggccgatctgcagaaattcagcccggtgatttcggacgatgtgtatccgatcctgtcgctgcagtcttgcctcgagaaacgcgcagcgaaaggcggcgtctcgccgcagcaggtagcccaggctatcaacgaggcgaaggctcgtttaagctaatccttagatatctgccctccctgacccggccaagcccagcgacgccgggttttttatgcaaaaaaaagcggacgcaaggtccgcaaaagttcacgttggctttagttgttcgggtagagaaacagtgtgacgggtcagtgattttcacaggtagaccgtctttatgggcgtattattgaacagaaaacttgatagggataatcgttcgttgctatgctatctatcgccatggactatcgtggcgatggaggatgaataatgaatattcgcgatcttgaatacctggtagcgctcgccgaacaccgccacttccggcgggcggctgactcatgccatgtgagccaaccgacgctcagcggacagatccgcaagctggaggatgagcttggcgtcatgctgctggagcgcaccagccgtaaggttctgtttacccaggcggggctgttgctggtggatcaggcgcgtaccgtgttacgcgaagtaaaagtgctcaaggaaatggcaagccaacaaggggaaaccatgtccgggccgctgcatatcggcctgatcccgacaattggcccgtacctgctgccgcacatcattccgatgctgcatcagaccttcccgaagctggaaatgtatctgcacgaagcgcagacccatcagctgctggctcagctcgacagcggtaagctcgactgcgccatcctggcgctggtcaaagagagcgaggcctttatcgaggtgccgctgttcgatgagccgatgatgctggctatctatgaagatcatccgtgggcgaaccgcgatcgggtgccgatgtcggatctggccggtgaaaagctgctgatgctagaggatggccactgtctgcgcgatcaggcgatgggcttctgctttgaagcgggggcggatgaggatacccacttccgcgcgaccagcctggaaacgctgcgcaatatggtggcggcaggcagcggcattaccctgctgccggcgctggcggtgccgcaggagagaaaacgcgatggcgtagtctacctgccgtgcattaagccagagccaagacgcaccatcggtctggtttatcgtccgggctccccgctgcgcagccgctatgaacatctggcggaggccatccgcggcacgatggatggccatttcgacaaggcgttaaaacaggcggtttaagccgttcagcgcggcaacccggtacgcttccgccatggtcgggtagttaaaggtggtgttgacgaagtactcaatggtgttgccaccgcctttctgctccatgatcgcctggccgatatgaataatttcggccgcgcgctcgccaaagcagtgaatgccaaggatctccttggtttcacgatggaacaggatcttcagcgtaccaacgctcataccgacgatttgcgcccgcgccaggtgtttaaactgggcgcggcccacctcatacggcactttcatcgccgtcagctgctgctcggttttcccgacggagctgatttccggaatggtatagatcccggtcgggatatcttcaatcagatgcgctgaggcttcgcctttcaccagcgcctgggcggcaatgcgtccttgatcgtaagcggcagaagccaggcttggatagccgatgacatcgccaaccgcatagatgtgcgggagggcggtctgatacatgctgttgaccttcagctgaccgcggctgtcggtctgcagaccgatattttccagcgccagggtgtcggtgttgccggtgcggccgttagcgtacagcaggcaatcggccttcagctttttgccggacttcaggtgcatgatcaccccgtcatccaccccttcaattttctcatactcctcgttgtggcgaataaccacgccgctgttccagaagtgataagagagcgagtctgacatctcctgatcgaggaaggccagcagacgatcgcgggtgttgatcagatcgaccttcacctccatgccgcggaagatcgacgcatattcacaaccgatcaccccggcgccgtaaatgatcacatggcgcggctcatgctgcaggctgagaatcgaatcgctgtcatagatgcgcgggtggtggaaatcgacatccgccggatggtagggacgcgatccgcaggcgataacgaatttctccgcggtcacagtctcgaccgtgccgtcatggcactccagcgccagagtatgctcatccacgaagtgggcattgccctgcagaatttcacagtggttgcgctcatagaatccctggcgcatatgagtctgctggttgatgacgctgtcggcatggttaaggatgtcggcgaaagaagagcgaagaaggcgggagtggtcgctgtagagggggttttggttaaactcgataatacggctgacggcatggcggagggctttcgacgggatggtgccccagtgggtgcaaccgccgccgacattatggtagcgctcgatgacggcaacgcgtgctccctgtttcaccagtcccatggcggcgccttccccgccaggaccggaaccaatcactattgcatcataatcccaagagtgtgacatggcattactcacctgttttatacataaaataaacacgatgataacattcgctgcgctttaacccaattatcgttgtgcttttttgcagcataaaagcagaaacggctcgtaaacaatcattcacaatccagggcaaaccgattagttttaatctctggtatagtgccagcagggctattggaaggattcatacatcgtgatgggcgtaagagcacaacaaaaagaaaaaacccgccgttcgctggtggaagcggcattca

SEQ ID NO: 5334 - DNA, 16450 bp, Unknown
  gut microbiota DNA sequence
ccatatacaccgctataccacccatcttttccccctcacgttttcaacccaacctgctatgctccttctttccctgttctctggagaactcaatgctgaccatctggggccgaaaaacctcctctaacgtgcaggcgctgatgtggtgtgttggcgagcttgggttggactatctccggttcgacgtggggcatcgctatggcggtaccgacagcgaggcgttttatcagctcaatcccaatcgtacggtaccagtgctgcaggatgacgaaaatccgccgctgtgggaaaccggcgcgatccttcgctatttagccagtcgctacgccgacgacgccttctggccgggcgaactgctggctcgtactgaggttgatcgctgggccgagtggtcaaagcagaatatcgccctcggctttacgacgccggtgttctggcgcgtggtgcgcacgcctgccgccgagcgggatccgcaggccatcgccgcggcggtgacggccctggagcaaaagctggcgattgccgaggcacgtctcgccgggagtcgctatctggtgggcgatacgttcaccctagccgatatccagtttggtcatgtgctgtaccgctactttgcaatcgatatcccccgtcgtcccctcccccaccttgcggcgtattatgcacggctaacctcacggcccgcctttcgccagcacgtcatggtcagctacgacgaactgaaggtctgaaggtggtcggtagcgcctcctgacgctaccgacataccggttaacgcgccatcaggacaaacacgccccagccgagatattcccgggtccaggtgacgtggtgtagcggcgcagtggtcaactgctggcgaacctccggtgcgaagtcatcgtgcggattggcctccagccagcggcgcattgtcagccatttcgccgcttcataacgatcccagccctcctggtcggccagcaccatctccaccacgtcatagcccagttcgccaaagtgggcgaccagcgccggtagcgtcaggaagtcatcgggtgactgcgcgccgcaggcaatcgcctcttctgccgtggccggacgtttgcgccaccatggctcgccgataagcaacatgccgcctggggtaaggctctgcttcagcagctcgattgtgcctgccaccccgccgccgatccacgtggcccccacgcaggcggcaacatcgcacggctggctggcgacatatccgctggcatcctggtgcacaaaggttacccggtcgcttaccccgagctcctctgcccgggcggccgcctgctggctgaacagcaggctcatgtctacgccggtgccgacgatctgatgatcgcgcgcccagctacagagcatctcgccggagccgctgccgaggtcaagaatggtggtgcccggcgccattcgcagcgcccgtcccagcgtggcgtacttttccggggtaaaagggttatggatacggtgctcgctttcactgatggtaaaaatgcgagggatatcgatcatgaggttttctccttgagagccatacgcccgggcagcgaccctgcccgggtcgctatttcagcggttgtccgcttgcgcgcgaacgttattcaaaccggtcgtgttgatccggtacggctggccgttcaccgacttaatcagctttttggttttgagctttttgaagaccgcaagggtgcagtcgctcagcaacagcccttcgcgggtgtagcattcaacggcggtaatgcggccggaggtatcgcggacgtgcgcaatacggccacctttggcgagaacgtgtaaggtccgttgttcctgacgggataaattcatactgaaacctgttcattatcatgtgcgaaaacatgcctacacccgcaggtgtgtgcgtaaggtttaagcgcagcgataatcagtccggcctgggcaggtcgggaaactgattatctgataatgacattctccagcatcgaagcctcagtgagcattgaaaggtatttaccagctgaatattaacaccttcatctggtaaggatattgtgcagattaaaaactgtgaccggtattacgatttccctcggccctatccccattttgcgctatccgccacccgctctgttccgcaactttcaccaccaccttatcccccttccgcattgttaaataattgttgtcagatcacaaaatggaaacaaaaaggccatttcgtacgcattttataaaaatgtagatatttttaatttatggctacgaaatgaacatcaccctgaccttacagcgaggaacgatcctgatgaacgccctgaccgcagtaaaaccgacacccgcgccggtagcccagcaataccctggcttttctttcaccccttccgcccagtcgccgcgcctgctggagctcaccttttccgccgaaacgaccacgcagttcctgcagcaggtcgcgcagtggccggtgcaggcgctggagtacaaatctttcttacgcttccaggtcggcaagatcctcgacgatctgtgtggcaatcagctgcagccgttgctgatcaaaacattgctcgatcgcgcggaaggcgcgctgcttatcaacggcgaagggatcgagcacgtcagccaggccgaggagatggtcaagctggccaccgccgtcgcccacctgattggtcgttccaacttcgacgccatgagcggtcagtattacgcccgcttcgtggtgaaaaatgtcgataactcagacagctacctgcgccagccgcaccgggtgatggagctgcacaacgacggcacctatgtcgaagagcaaaccgactacgtattaatgatgaagatcgacgagcagaacatgcagggcggcaattccctgctgctgcatctcgacgactgggagcatctcgacgaattcttccgcgacccgctcgcccgccgcccgatgcgctgggccgcgccgccgagcaaaaacgtcagcaaggatgttttccacccggtgttcgacgtcgattcgctgggccgcccggtaatgcgctatatcgaccagttcgtccagccgaaagatttcgaagaaggcacctggctgagccgcctctccgacgcgctggagaccagcaaaaacatcctttccataccggtgccggtgggcaaatttctgctcattaacaacctgttctggctgcacggccgcgaccgctttacgccgcacccggacctgcgccgcgagctgatgcgccagcgcggctactttgcgtattccacgaatcattaccagactcatcaataagggttttcaggcgaaggaattgagcggatgtatgatttcgtgattatcggcggcggcatcatcggcatgtcgaccgccatgcagttaattgagatttatccggacgcccgcattgcgctgctggaaaaagaggccggcccggcctgccatcagactggccacaacagcggcgtgatccacgccggggtgtattacacgcccggcagcctcaaggcgcagttttgcctcgccggcaaccgcgccaccaaggccttttgcgagcagaacggcatccgctatgacgtctgcggcaaaatgctggtcgccacctcaccgctggagatggagcggatgcgcgccctgtgggatcgcaccgccgccaacggcctgcagcgcgagtggctaagcgccggggagctacgcgagcgcgaaccgaacattaccgggctcggcgggatctttgtcccttccagcggcatcgtcagctaccgcgaagtggcggcggcaatggcgaagaacttcgaagcgaaaggcggaacgattgtctacaacgccgaagtcagcgccctgaaagaacatgccagcggcgtggtgatccgcacccgccagggcggagaatatgaggcctcgacgctgatcgcctgttcgggcttgatggccgatcggctggtaaaaatgctcggcgtcgaccccgggtttatcatttgtccgttccgcggggagtatttccagctggcgccgcagcacaatcagatcgtcaaccatttgatctatccgatccccgatccggcgatgccgttcctcggcgtccatctgacccgcatgatcgacggcagcgtcaccgtcggccccaacgccgtgctggctctgaagcgcgaaggctaccgtaagcgcgatatctcgctggccgataccctggagatcctcacctcgcccggcatccgccgggtactgcaaaacaacctgcgctccggactgggcgaaatgaagaattcgctgtgcagaagcggctatctgcggctggtgcaaaaatactgcccgagcctgacgctgagcgatttacgcccgtggccggccggcgtgcgggcgcaggccgtgtccccgcagggcaagctgatcgacgattttctcttcgttaccaccgcgcgttcgatacatacctgcaatgcgccatcgccagcggccacctccgctatcccgatcggcgcgcatatcgtcagcaaggtgcagagcctgctggccagccagagcaatcccggacgcacgctgcgtgcggcacgtagcgtggagacactacacgccgcttttacccgttaaccccccctgaagacaggaagcaattatgcaactcaacgatatgacactgtttcgccagcaggcgctgatcgatggccagtggcgcgatgcgcccaacggcgacgtgattgcggtcaccaacccggccaacggcgagcagctcggcagcgtgccgaaaatgggcgccgatgaaacccgcgaagcgattgaagccgccaatcgcgccctacccgcctggcgcgccctgaccgccaaagagcgggcgaacattctgcgccgctggttcgatcttatgatggagaaccaggacgatctcgctcgcctgatgaccctcgagcagggaaaaccgctggcggaagccaaaggcgaaatcagctacgccgcctcctttattgagtggttcgccgaagaaggtaagcgcatctacggcgacaccattccgggccaccaggccgacaagcgcctgctggtgattaagcagcccatcggcgttaccgccgccatcacgccgtggaacttcccggcggcgatgatcacccgcaaagcgggcccggcgttggccgccggctgcaccatggtcctgaaaccggccagccagacgccgttttccgcgctggcgctggccgaactggcgaatcgcgccgggatccccgccggagtgttcaacgtggtcaccggctccgccggcgcggtcggcggcgaactgaccagcaacccgctggtgcgcaagctctcctttaccggctctaccgagattggccgccagctgatggagcagtgcgcgaaagacatcaaaaaagtctccctggagctgggcggcaacgcgccgtttatcgtctttgacgatgccgacctcgataaagccgtcgagggggcgctggcgtcgaagttccgcaacgccggacagacctgcgtctgcgccaaccgcctgtacgtccaggacggggtgtatgaccgtttcgccgagaagctgcagcaggcggtggaaaaactgcgcattggcgacggcctgcaggacggcgtcaccaccggcccgctgatcgacgagaaagccgtggccaaagttgaagaacacattgccgatgccatcgccaaaggcgcgaaggtggtcaccggcggcaaaccgcacgccctgggcggcaacttcttccagccgaccatcctggtcaacgttcccgacagcgccaaagtggcgaaagaggagaccttcggcccgctggccccgctgttccgctttaaagatgaagccgacgtcattgcccaggccaacgataccgagttcggtctcgccgcctatttctacgcccgcgatctgagccgcgtcttccgcgtcggcgaagcgctggagtacggcatcatcggcatcaataccggcattatctccaccgaagtcgcgccgttcggcggcgttaaggcctccggcctcggccgcgaagggtcgaagtacggcatcgaagattacttagaaattaaatatatgtgcattggcctttaacaggagcgacggatgaacagcaataaagcaatgatggcgcgtcgcagcgacgcggtaccgcgcggcgtcggccagatccaccctatcttcgccgaacgcgcggagaactgccgggtgtgggacgtggaaggccgggaatatctcgattttgccggcggtatcgcggtgctcaataccggccacctgcatccgcaggttgtcgccgccgtcgaagaccagctgaaaaagctgtcgcatacctgcttccaggtgctggcctatgagccttatctgacgctgtgcgaaaagatgaatcaaaaggtgcccggtgatttcgccaagaaaaccctgctggtcaccaccgggtcggaagcggtggagaacgcggtgaagatcgcccgcgcggcaaccgggcgcagcggcgctatcgccttcaccggcgcctatcacggccgcacccattacaccctgtcgctgaccggcaaagtgaatccttactccgccggtatgggcttaatgccgggccatgtctatcgcgccctctacccatgcgcgctgcacggcgtcagtgatgacgaggcgatcgccagcatccatcgcatcttcaaaaacgatgccgcgccggaagatatcgccgccatcattattgagccggtgcagggtgaaggcgggttctatgccgcctccccggcctttatgcagcgcctgcgcgccctgtgcgacgagcacggcattatgctcatcgccgatgaggtccagagcggcgcgggtcgcaccggtaccctgttcgccatggagcagatgggcgtcgcggcggatatcaccaccttcgccaaatccatcgccggcggtttcccgctggcgggcgtcaccggccgcgcggaggtgatggacgccatcgcccccggcggactgggcggcacctacgccggcaaccccatcgcctgcgccgccgccctggcggtattacagattttcgagcaggagaatctgctggaaaaagccaaccagctcggcgacaccctgcgccagggcctgctggcgatcgctgaagatcatccggagatcggcgacgtgcgcggtctgggggcgatgatcgccattgagctgtttgaagagggcgaccgcagcaggccgaacgccaggctgacggcggatatcgtcgcccgcgcccgcgacaaaggcctgatcctgctctcctgcgggccgtactacaacgtgctgcgcatcctggtgccgctgaccatcgaagaggcgcagatcgagcaggggctcaagatcatcgccgactgctttagcgaggcgaaacaggcatagagaaacaggcatagaacagaacacatgcggaagcgaagtacgttcgtaagggaatgaagacgagacctgcaaaacaacaataatacgcgtgctccggcgcgggaacgtcggggcgctctcccaggtgacacacttcgagagggtaaatgatggggcaactgtcgcaatcacaggatttaggggcggggctgaagtcgcgccacgtcacgatgttatctatcgccggggtgatcggcgcgagtttatttgtcggatccagcgtcgccattgccgaggcaggcccggcggtgctgctggcctatctgtttgccgggctgctggtggtgatgattatgcgtatgctggccgaaatggcggtcgccacgccggataccggctccttttccacctacgccgataaagccatcggccgctgggcggggtataccatcggctggctgtactggtggttctgggtcctggttattccgctggaagccaatatcgcggcgattattctgcattcgtgggtgccgggcgtcccggtgtggttgttctccctggtcatcactctcgccctcaccggcagtaacctgctgagcgtcaagaactacggcgaattcgagttctggctggcgctgtgcaaagtgatcgctattctggcgtttatcgtactgggcgcggtcgccattaccggcttttatccctatgccgaagtgagcggcatttcgcggctgtgggatcacggcggctttatgcctaacggcttcggcgcggtgctgagcgcgatgctgatcaccatgttctcgtttatgggcgcggagatcgtcaccattgccgccgccgaatcggataccccggataaacatatcgtgcgcgccaccaactcggtgatctggcgtatctctattttttatctgtgctcgatctttatcgtcgtcgccctcatcccatggaatatgccggggctgaagagcatcggctcctaccgctcggtgctcgagctgctgcatattccctatgccaagctgattatggacggcgtgatcctcctgtcggtcaccagctgtctgaactcggcgctgtataccgcctcgcggatgctctactccctgagccgtcgtggcgatgcgccggccattatgggccggaccaaccgcagcaaaacgccatacgtggcggtgctgctctctaccggcgcggcgttcctcaccgtagtggtgaactactatgcccccgccaaggtgtttaaatttctcatcgacagctctggcgccatcgccctgctggtctatctggtgatcgccgtttcacaactgcggatgcgcaaaatccttcaggcgcaaggcggcgagatccgtctcagaatgtggctctatccgtacctgacctggctggtgatcgcctttatcaccttcgtgctggtggtgatgctgtttcgtccggcgcagcagctggaggtgatctctaccggcctgttagctctgggaattatttgtacggtaccgattatgtcacgctggaaaaagctggtattgtggcaaaaactgccgctgcaaaatacgcgttaaccctgttcccggcgcccgccgggaagagtattcaggagtaagaacatgaccgccattccccaggcgacggccattgacggataccgttggttaaaaaacgacatcatccgcggggtttaccaccccgatgagaagctgcggatgagcctgctgacgtcgcgctatggcctgggggtcggtccgctgcgcgaggcgctttcgcaactggtggccgagcggctggtaacagtggtcaatcagaaaggctatcgggtggcgcccatgtcggaacaggagcttctcgatatcttcgacgcgcgcgccaacatggaggccatgctggtgcgtctcgccattgaacgcggcggcgacgagtgggaagccgagctgctggcccgcgcccatctgctcaacaagctggagtcgtgcgaagcgagtgagcgcttactggatgaatgggaccagcgccatcaggcgtttcacaccgccatcgtcgccggctgcggttcgcagtatctgctgcagatgcgcgaacggctgttcgatctggcggcgcgctaccgcttcatctggctgcgcaccaccgtgctgtcggtggagatgctggaagataagcatgtccagcatcagaccctggtggacgctattctggcgcgcgacgccgaacaggccagcgcgctgatgcgcgagcacttactgactccgatcccgattattcagcaggcgatggctggcaagctgtcgccgcaggcagggtgagtcagatggaggggtggaaattacgggtatggcggcacgcatctccacgccgcacgggcgtggagaaatcgtatccgtagatcaatcaggctcgcaggcgaaccggttcgctgaaatcgtcggccggttccagcttcagattaaaggtggtcagcagcgctgccgcgcgctcgtgaaactcgcgcagcgttttttccagcctgtcgctcacttccgggtcgccaatgtcgaccgcctgccatgatccttccttattgaacaggccaaactggtagctataggtgaaacgtgactcttgtgcttccatttccatccaccagccccagaattcacgcttctccggtgcgggcttaacattgacgcaaactgccaggcaatcgaaaaagaaacggttgtcatggcactgctcttcgcgaatgtaaggccccagcgccgtgaatttcttgatcaacttacttttcaggtgtccactcggtaacgtcattgcgatctcctttagtgatgcaactgttttaccaaaccaatagaatttagcaataaattaaccaaatctatgattgatccagcgggcgatctgtcgcaatgcgtgatcaaaattgcgatacaccgggttaaacgggatctccagcagtttgccatcggcagatgacgaagtgattaaccgcgactcctcttcggggctgaacggatcgtccttccagaagccggagagcatcggcgtcgggcaacggcgccccagcagtccctgggtttttaacgaatagcggttgagctccacgcgtagcgcttcatcggacgcgtcatgcatgcccagccgcgaagccagcacgtcaagatacatctccggcacgcgcccctgatgcaggggatccaccagcagaccatgaacgaccgggcccagacaggctacagccttcagccgctgcggctccagataacccagacgcaccgcgatattggcgccaaagcggaagccgaaagcggcgacccgggtatggtcaatccacggcacattttccagatggcgcagcgcgtgctgatgcagcaggctggtgtcctgatttagcgtccattttgacgagaagccgatggagggcatatcaatggtcagcatggcaatgccgagcggtgagaagtagttctcatacaggttgtaataatcggtctgcagcgagtccagccccccgcacatcagcaccgtcggaaacggcccctcgcctttcggcatatgcaaaaagccggttatcggcgagccgccagggatggtgaactccagctcgcgcagcgagcccggcagccgctgggcggcttcttcatacgcccggttggctaaagcctgcgcctgttccgccagctcatcgcctttaatatgcggataagcggcaatgctatacaggttcgaggcatgcagccagtggcggccgctcagcaaaggatcggcttcctgcccggccttttgctgccactgcatggcttctttcgcccactcgaagatccagttgccgccgcgatagccgatgacggtatcgaacagctcaggatcggttcgttcggcctcgctcatcacaatgcgcgcttgcacatcgaggatctcctgcggagttacgccgcgccagatccacatcaaacggttgatcagacggtaccagtgatcgacgtgattgccgctcagcgccgactgcatcgcctggggttttccggcagaaaaccgacgcaccagcgtagaagtttcgggatgtttgaagcgaggtttaaacagcgtttcgctgaggttagcctgtgacatgtgcagtctccgtcgtagtgccactccggatattgtaacctgctaaaggataaaaaaaaccacgcccggcaagccgggcgtggtaaatagcactgacctgaagaattaacgacctgcgataggcggtacaaacaccacgcccatatcccacggctgttcaatccaggtatcctgcggaatatccacaacgtaatcgtccaccagcgggcggcctgccggcttggcgaaaatggtgacaaagtgcgctttgggatacatttcgcggatcgccacggcggtaccgccggtatccaccagatcgtcgatgacgataaagccttcgccatcgccttccgcacgtttcagcactttcagctcgcgctggttatcatggtcgtagctggagatgcatacggtatcaacatgacgaatgcccagttcacgcgccagtaaggctcccggtaccagtccgccgcggctaacggcaataatgcctttccattgctcaaccggcagcagacggctggccagtttgcgggcgtgaatctgcaacatgtcccaggtgacgacgtatttttcgctcatgtgaagtgtcccagcctgtgtaatacggcttaaataatgttcgagggggaaaatggttgcgcgagattatagagatctgacgcactaaaaaccagtgctaagcggtttgcgcaacgctttttgcgttgtttacactacctgcggcggtggaaagtggtattctcaaccccatcgcgcaagcccgggcttgttgtgtattttaacgctaaccctcgtcctgcaaccgctgtatgcaggagtctgtaaggagacttaccgtgtctgaactgtctcaactatccccgcagccgctttgggatatttttgccaagatttgctccatcccgcacccgtcctatcacgaagaacagctcgccgagcacattatgggttgggcaaaagaaaaaggcttacatgcggaacgcgaccaggttggcaacattctgattcgtaaaggcgcgactgccggtatggaaaaccgtaagccggtagcgctgcaggcgcacctcgatatggtgccgcagaaaaataacgacaccgtccacgacttcgttaaagatccgatccagccgtacattgacggcgaatgggtgaaagcgcgcggcaccacgctgggcgcggacaacggtatcggaatggcgtccgcactggcggtactggccgatgatagcgtcgctcacggcccgctggaagtgctgctgaccatgaccgaagaagccggtatggacggcgcgttcggtctgcaggccaactggctacaggccgatatcctgatcaacaccgactccgaagaagaaggcgaaatctatatgggttgcgccggcgggatcgatttcacctctaacctggcgctgacccgcgaagcgattcccgccgggttccagagctttaaagtcaccttaaaagggctgaaaggcggccactccggcggtgatatccaccttggtctgggtaacgccaacaagctgctgtcacgcttcctcgccggccacgccgatgagctggatctgcgtctggtcgatttcaacggcggcacgttgcgcaacgccatcccgcgtgaagcttacgctactgtcgccgtcgccgcggataaagccgatgcgctgaaagcgctggtgaatacttaccaggcgctgctgaaaaacgagctggaggccaaagagaagaacctggtggtgctcgtggaagcggtcgataacgacaaagcggcgctgactcaggcttcccgcgacactttcatccgtctgctgaacgccacgccgaacggggttatccgcaactctgacgtggcgaaaggcgtagtggaaacttcgctgaacgtcggcgtcgtcaccatgaccgatgacaacgtacagatccactgcctgatccgctcgctgatcgacagcggcaaagactacgtggtcagcatgctggattctctgggtaagctggcgggggcgaaaaccgaagccaaaggcgcttaccctggctggcaaccggacgccaattcgccggtgatgcacctggtgcgcgagacttaccagcgtctgttcaacaagacgccgaacatccagatcattcacgccggtctggaatgcggtctgttcaaaaaaccgtatccggagatggacatggtctccatcgggccaaccattaccggtccgcactccccggatgagcaggtccatatcgagagcgtcggtcagtactggacgctgctgaccgagctgctgaaagccattccggctaaataagccccacaaccggcggcggcccgccgccggttttaccccgcatcaccttagcgccacgcgtttttccatccggtaattaataaaccactccccgcgcgccgccacccgttgctcagccaccaccttaaaaccatgagccgtaaaacagggctttgcggtaatgctggcgtccaccgtcaggatttgcgctggatactgagcgcagagcgcctcgataagcgcgccgccgataccctggcgggcacgatccggcgagacgaacagcaaatcgatatgcgtcccgatggcggtgataaagccaaccggctggctgttgaccacggccaccaggccgattgagtcggccagcttttgtcgccagcgcgtctcatccacctgcgcccaggccgcgatctgccccggggtatagtcccgactggcggtttcccgcaccgcgcgcagaaagatctggcagagcagtggcaaatcgctgtcgcggtaagcacgaatatgcatggctaaatccctaataaaagctgcctttccagctgcggatcgagcaacgtcacgtggagcccaaccaggcgcacgccccgtccgccgcggcgctcatcccaggctttgtgcgcggtggcgatcagatcctctttgttcagccgcggccagacgtgctcctgggtggtcagctggaaatcattgaatttcagtttaatgccctggcgggcgatcagcagatcaggtttgaccttcgccagtcgcctctccagctcgggatagaggttttcgataatcgcttcgcactccggccattcatggatatcttccgctaaggtgcgctccacgcccaccgatttacgctgccgatcgttatgaatttcccgctcatcaatcccgtggctgcgctcccacagaatacgcccgaatttaccgaagcgcttaagcagcatggccagatcgctgttctgcacatcgccacaggttcgcaggcccatattttccagcttcgctgccgataccttcccgacgccgggtattttcgccagcggcagcgcccgcacaaactctgccacctgatggggggcgataacgaactggccgttgggtttattcatatctgaagcgattttagcgagaaacttcaccggcgccacccccgccgaggcggtgaggcgcagctcccgttcgatggtctggcggatctcctgggctatcagggtggctgacccgtgacaatgttcgctgtcgctgacgtcaagataggcttcatccagcgacagcggctcaatgcgcgaggtatagcgggagaaaatttcgcggatatggttcgaggcttctttgtaggcatcaaagcggccgggaagcagcgtgagatgcgggcacagcttgagcgccgtcgccgtcggcatggcgctgcgcacgccaaacttacgcgcaggatagttcgcggtactaatcacgccacgttgtacccgactgccgcctatcgcgaggggaatatcgcgcaacgctgggttgtcgcgcatctccaccgccgcaaagaaacagtccatatcgacatggataattttacgcatcgtcagactcaacactgtatacccatacagcatagcaaaaacagatgcgaattttatgctttttttatttcatcggctaaaaaagcggttaaaacataaatctgcaataaatcatgtttattttcattgagttaaaagataaatcaggaagatataatcatgaagaaaatacttaccgcgctttgcctgctggccaccgccggcgcctgggccgctccacagctgatagcccaccgcggcggcaccggcgatgcgccggaaaataccctgccggccattaagctggcgctggagaataacgccgaagccatctgggtcacggtgcagttaagccgcgacggcgtaccggtgctctaccggtcaagcgatctttccgcattgaccaatagcgagggcaaagtttccagtttgaccgccgccgagctggcgaaagtcgacgccggctggaaatgggggggtgacaaccacccgtggcgcggtaagcaggccaccattccgaccttgcaaagcgttttacagcaatggccgcacacttttttctatatcgatatcaaatctccggatgccgatccgaccgtgatgggccagcgcctgcttgaagtgttaaaaaccaccgatagcctcgatcgcgtgcgggtctattccaccgaagaccgctatatcgccgccctgccgccagccatccctcgctttgtcactcgcagtgaaacccgcaccaggcttgccaatatttcgctcagccatcagtgccagccagcgagtcaacgcgatggtgagcagtggtatggcctggagctgaagcgcaaagtcgaggtggtggagaaattcacccttggcgaagggatctccccggcgacgctcacctgggataaagaggcaatggattgcttccgctcgcaggataaagcgcacattatcttcttcggcatcaacagtgcggaagactaccgcacggcgatagaactgggcgccgacggggtgatggtggattctccggcgcaggcgaaaagctggcagtaagggagtcaacggctaaaaaggccgcgaaagcggcctcacattgctggcatgttgttgccgggtggcggctggcgccttacccggcctacaaaaccgaagcagcagccccggcatgcgcagcgccgccgggcacggagccgctttatgccgggtggcggctggcgccttacccggcctacaaaac

SEQ ID NO: 5335 - DNA, 515 bp, Unknown
  gut microbiota DNA sequence
gccatgcctgcgcccggcgtcggtcgaccgacggcgatccagtcgaataacaggtaattgtccgcatcctgacctgatgtgaaatcgaagcggaaacgacgaatcgttgtcgaatctcgccactcaatgtcgtgcagggtcagaatcgcaatacccttgtcatcgtattccggttcattgataactacggagcgaccagcattccagccggtttcatcagcgccaatccagaacattttggcgttccaggttgggttgccaacctttttaatgcgcatcttaatgaaacgataagcatgggcatcgatcgtcaagccgttaggggaacgacaggttgaggtcggattgttcgctttcagccagccatcgctggtgacgctcattggcgtgtagccattatcatcttccgtccagccttcagcgtcctggtcgaaataccagattttcagagagtcgaactgttcccctgtgccagcggcaatctgcgagatctgtcgcgcgaggttttcgtcacc

SEQ ID NO: 5336 - DNA, 270344 bp, Unknown
  gut microbiota DNA sequence
cctacataacacaggcattaatctgatttaatatcaaacggttgcagtgaaatcgtaggcccgtgcaagcgcagcgccgccgggcaagaacagccgacgcggagccgttttatgccgggcggcggcgatgccttgcccggcctacagaagacaggcattaatacaccgtaatatcaatcggttgcatagatatcacaggcccgtgcaagcacagcgccgccgggcaacagacatcaggcatcgtacgcgtccttttgccgggcaatggcagatacgctcgcgctatctgcaaaccaatgcccggccggctccttagcgttcttcgttaaacaccgcgcccacctggcgccgcacctcatccatcacctgcagattctgcagcacccgactgagcggccgcagcggcgagtcctgcaacccctgcccgatgcaccaggcaaaatgctccgcctgccagaacagctggtcgtaacgattgcgcggctcttcccagcgcagcacctgcccgccctggctggcggcgagcgtgaagccgccgggggcgtaaaactggccgtcgatcgtcagggtcgcctggcgtccggccaccaccgccccgcccggcgtgttgctgaacaaagtggtgtttaacaacccctgcatcccgttctgccagccgaacagcatcgacgtctgaccgttcagcccctccgccgtggcgctgccgcgggcgacaatctcctgcggcatgccgcccaccatcagcgcaaacgaggtcacatagctgccgaggtccatcatcggcccgccggcaagatcggcattgaagatgcggtgctcgggggtgaaatactcgccgtgatcggccagcagggtatgcaggtcgccgagcgccccatcctccagcagctggcggatcacatcatatttcggcgcgtaatcgcaccacattgcctccagcgccagcttctcctggcgggcggcttcggcctgcagctcacgcccttcgccgaggttgagggcgaagggtttctctatcagcacgtgtttgcccgccttcagcgcctgcatgccgtcgggaaagtgatggttgtgcggcgtcgcaatatacaccgcatcaatatccggacgcgccagcatctcctccacctggccgtaagcctgggggatcccccattccgcggccacccggtcggccttcgcctggctgcgggaaaccaccgccaccacctgctgccggctgtaggttttcaatgagtgcacaaagcgctcggcgatccagccaggaccgataatgccccagcgcaggatgggaatgctctgcgccgccgggcggcgcggggttggtaagtgtgacggaaacatagcggctccttagtctttaaccacgttcacccagcgacggctggccatcgaggcttcaatcgccgacagcacgcgctgattctgcaaaccaaattcaaagttgggatagcagtcgccctccccgcaaatcccctgcaccaggtcatgcacttcgatcaccttgacgtcaaaatagcccagcccgccgccgccaaaatcgaagccgaagaagccggcataggccgggatctggctcccggcatacagcgtcttaaagccgcggtcatgtttatcatcgttgaagcgatagacctgcagctcgttaaagcgctccccgtccatatacagcgtgccttcggtgccggagacctcccagaacacgccgaagatccgcccggcggcgatgcgcgaggcctcaatcacccccgcggcgccgctgtcgaaattgaccaggcactgaacctgatcgtcattttccacttcccgccactcggcatcgaccgcgacctggctggcatacccggcatcggtctgcggcaccggacgctggcgcaggcaggtttgcgcgctggcggtcacttcacggatcccgcccagcaaaaactgggcgacggacagggtatgggcgccgaggtcgccaagcgccccgctgccgccgagagttttcgagcagcgccaggaccagggcaggttcgggtcgttataaaacccctgatcaaaggtgccgcgaaagcgcaccggttcgccaatatcgccccgggcgataatctgctttgccagcagcgccgccggcgttttgatgttgttaaaggccaccatggtcttcacccccgcgcgccgtgccgcctgcgccatctcctgcgcctgctgctcattgaccgccagcggcttctcgcaatagacatgtttacccgccgcgatcgccgccatcgccattgtgtagtgcagatggttcggcgaggtgatatccaccacatcaacctgcggatcgtttaccagctcgcgccagtcgccgtaggccttttccgcccccagtttcgccgcgtggcgttcggccatcgcctgatcctgatccgccagcgcgtagagatgcgggcgcttgggcagatcgggatagaacatcgccgcgcgacggtaagcgtcggcgtgtgcctgccccataaaacctgagccgataaggccgatatttaaccgcgcgctcatgatgcgtactcctctgacgatgaaggggaagataaatggtgcgccagccaggcataggcgcggctggcggtggccagcggcggcgccatcgccgggtcctgctcggcttcgataatcagccagccgcggtagtcgctgtcccggacaaagtcgaggatcggcgcatagtcgatgcagccgtcgcctgggatggtaaacagcccggcgcgcaccgcctcgttaaagctcaggttttcacgatacagacgccccagcacctggggacgcacgtctttcagatgcagatggcggatacggtggccatatttgtgcagtacgcgcgggatctcgaccccggcaacaaaggcgtgcccggtatcaaacgccagcccgacgttgtcatgggtgtgagacagaaaccgctccagctcctcatcgtgctccaccagcatcatcagatgatggtgataggccagctggaggtcatagtcgcgcagcagcaggtcagcaaaggtattcagcttgtggcaatacgccgcaaggctgacgcggcttaacggcggcgagagcgaaataggctcatcaagcggggtttcacctggcagttgcccgcattcgccgtaaaccatcaccttcgcgccgagctgccggaggagctgggcgtgctcccgcaccgcctccagctccgcttccacgctgcggtcggccagcatgccgctgtaccagccggacgccaggcgcaggtcagccgccgccagcagcgggcccagggttgctgcctggcggggaaatttccgtcctaactcaatgccctgatagcccgcctcccgcgcctcgcgcaggcaggtatccaggggaatatcaccgcctaaatcctcgagtacatcgttggtccagcacagggggctcacgccccaccgcagttgctctgtcgccatcttgttctcctttccaccctgtggtcttgtctggcgtcactataagcaggtgacgaccgacgatgaaaacggagaaatgatggaaatccatcattgcgctggcggtatattcgctatttcaggtaaccctgaaaaataaatggaaataatgcttgccgccggcttattttgcggataaaaattactggcttaataacccgcttcagaggttatccctttcattcaaaatatgatgatagcaatatgaaaaaaaactcaacaccgcaccagcgcgggcttttgccgtgcaccaaggacaggcctgctgttatttgcctgaatgacacatagccgcttttaaaacatcaaataattaacattctctctgcaataatatgacaagcagtgggaaggttggcttgcgaaataagcatgaaactttgatgttttactaataaataaccccagagcctcttgctaattacttatcaggactggttgggttattttattctgacgccaacgggagaatacaccaacgtgtatccctctctctggcccggcacgccgctatcgcgatgagaaacaataagatgaataagacctggcttttcaccaccctcaccctggcgctggtcgccgccgcgccggcccacgccattagcgcgaaataccgggaacagcttgaacgttccggctgcacgcagatgaccgacgggatcacctgcgatattcataaaaccaaagccgagaatgccgccgccgcacagcacgccgatagcggcttcggcccctgggtgggcacctggtatgtttatacggagtatggcgataaaattgatgagattaccgtcaccgctaaaacggtgaaaacccatggtcatctggtcgaggcggcgaaagccagccagggtaaactgaccttccgggtgaaaagctcagcctttacgctgaacgacgcctttaacggcgtatgggcaaacggcagccagcgcggcacgttgcaaaaagtcctgtaataacatcgctctgccgacaggccggggataatgcagacagaacctcccggcgcaggccgggagggagtgcaatggattacttctgcggacgcatggccgggaagaggatcacgtcgcggatggtatggctgttggtaaacagcatcaccatgcggtcgataccaatacccagacccgcggtcggcggcaggccgtactcgagggcggtcacgtagtcttcgtcgtagaacatcgcttcgtcatcgcccgccgctttggcgttcacctgatcctggaagcgctgcgcctggtcttcggcatcgttcagctcgctgaaaccgttaccgatttcgcggccgccgatgaagaattcaaagcggtcagtgatttccgggttgacgtcgttacggcgcgccagcggagaaacttccgccgggtattcggtgatgaaggtcggctgaatcagatgcgcttccgccacttcgtcaaagatttcggtaactatgcgtcccagcccccagcttttctctacctgaataccgatagattccgccagtgctttcgccgcgtcgaagttatccagatccgccatgttggtttccggacggtgtttcttgatcgcttcccgcatggtcagtttttcaaacggcttgccgaaatcaaacacctggtcgccatacggcacttcggttttgcccagcaccgtctgcgccagggtgcggaacagcgactcggtcagttcgatcaggtctttgtagtccgcatacgccatatacagttccatcatggtgaactctgggttatggcgtaccgagatcccttcgttgcggaagttacggttgatttcaaacacgcgttcaaaaccgccaaccaccagacgtttcagatacagttccggcgcgatgcgcaggtacatatcgagatccagggcgttgtgatgggtaatgaacggacgggctgacgcaccgccagggatcacctgcatcatcggcgtttcgacttccataaagccgcgggccaccatgaactggcgcatggtggcgaggatctgcgaacggatacggaacgtatgacgcgactcttcgttggcgatcagatccagatagcgctggcgatagcgaacttcctgatcctgcaggccgtgaaatttatccggcagcgggcgcagggctttggtcagcaggcgcagctcggtgcagtggatcgagagttcgccggtttgcgttttgaacagcttgccgcgggcggcgatgatatcgccgaggtcccatttcttaaactgttcgttgtagacgccttccggcaggtcatcgcgcgccacgtacagctgaatgcggccgccgacgtcctggagggtgacgaaggaggctttgcccatcacgcgacgggtcatcatccgaccagccaccgcaacttcaacgttcagggaagcgagttcatcgttgtccttcgcatcgaattcagcatgcaattggtcagaggtatgatcgcgacggaaatcgttggggaaagctacgccctgctcacgcagcgcagccagtttttcgcgacgagctttcagttcattattaaggtcaatggcctcatcggcaccttgtgcttgttgttcagacatatggattcctcataaccttgctttcaaactagcttcgataaattgaaccaggtcacccttccgcgcggcctgtctctgggaagacaccagagcacaatcttaacgatcctggattcactccaagctgatctcactcagctatggcttcagtaacggtattttttatcgttggcctccgcgcatgccagaatatcctcctcctgttcactaagctgtgcaaggagcgacttcgcgctccgctgttgaggtaatgtccccggtcgcgctgcgcttaccggggctacgaatcgcagcccggacaaggtgtttacgccacgagccgggacgagcgtcaggcgccgccgccggtaatttcaccggcagccgcacgacgtttgccgacgctacaggccgcggcaaaggcgataatgaccatcaccgccacgcagccaagggtccattcgcccatctgcgcgaagaaatgctgataggcggcaatcgccgtatcgctgatttgcgattcggtggtttgctgggcgaccacgcccgccagccagttggccaccgcgccggtggccagcatataaatgccggtcaatacgccggtgacgccgggcatgttcagacgggtgatttgcgccatcgccaccgggtcgataaacagttcggcaaagcccatcatcgccagcccggcgaccatcatgcccatcgaggcctgaccgtcagccgcgccatggcgggcattgagcgccagcagcataaagccgccgcccatcagcagcaggccgaaagaaaatttcagccagacgcgcagcaccgaacgcacgctgccttccgggcgcatcagccacgccagcaccacgccggccgccatcaccgctatcgcgttaaccgactggaacagcgcggtcggcacgtcccagttcagcagacgacgattgacgaagtggtcgataaacaggctaatcgagctcccgccctgctgcgccagcacccagaacaacgttccggcgagcatcagcaggacgatctgccacagcgcgcgacgatgctccggggctttgatcatgatccgcgccaccatctgggcggcgaacaggcagacgatcgctagcagatagccggaccagttgttttgcagcagcagcgtgaaaaataccggcgccaggcagagcatcaccagcagccagccccaggtcggcagcacgaacttcaccgcccgcagcgccggtttatcgacgccgcgggtatgccggaagtggcggctgccgcttaagaaaatcatcaggccgataaacataccgatccccgcaagggcgaagccgatatgccagccgtaccactgcgccgccagtccgcaggcgatgggcgcggcaatcgagccgacgttgccggcggcgtacagcagcgagaaaccgccgtcgcgacgcgggtcgtcgtgagcgtacagttcgccaagcaggcagctgatattggatttaaacaggccgtagccgcagatgatgatcgccagcgcgacgtacaaactccatgcggaggtcgactcaacgcccagcaccacatggccgagggtcatcaacagcgccccggcaattaccgccgtgcggttgccgagcaggcggtcggcaagccagccgccgagaataggggtaacgtaaaccagagatgcgtaagcgctgaacaggctgatggcgtggctgtcgtcgaagccaagctggtgggtaaggtaaaggatgagtaaggcgcgcatgccgtaaaagctgaagtactcccagatctggatcgcaacgatgtagtaaatcgcgcgcggctgtgagggtgttttcatgtgttctccttgcagcgtgaaaaagggaagtggcaagccacttccctggtgtgcgtctattacttgttattctcttctttcagcactttaacggtgtaacgaccatccgcctgacgataggcgccgtggatatcggtttcgaagcctggatagtgggcgccgatttcgcacagcatctgcaggaactccagcaccggacggctctcttcggtgatcatctcacccggcatcaccagcggcactcccggaggatacggcaggatcatgttggcgttgacgcggccgaccatctcttcgagatacacttcttccgtctgaccgtgcagctctttctggaacgcggcatacggggtcatcaccatcgatggcagcacttcaaacgcgcggaacatcagatccggcaggttgtgatgctcaatcagtttgtgaatgttctgcgcgaggtcctgaatacgcatgttttcatagaattcaggatcttcacggtacagcgacggcagcatgtttttcacccgcaggttcaggtcgaacgcgcgtttgaagtcggtcagcgcacgcagcaggctcagcgctttagtcttatcgataccgatactgaacaggaacagcaggttgtacggaccggttttctctaccacgatgccgtgttcgtcgagatatttcgccacgatgcttgccggaataccgaagtcatccatggtgccgtctttcttcatccccggagtcagcagcgtgactttgatcgggtcgaggtacatgtgttcgttatcgatgtttttgaaaccgtgccatgcgctgtcggaacgcagcggccagcattcaggaccatcgatatgctccggctgccagacgtcgaagaaccagccgtcagactcgcctttcagacgtttgatctctttacggaacttgatggaacgttcaatagagccatcgatcagacgcttaccagcgttccccttcatcatcgccgccgcggtttcggtggacgccacgatcccgtagtgcggggaagtggtggtgtgcatcatgtaggcttcgttgaaggtctcttcgtttacgtcgcctttcacgtggatcatcgacgcctgggagaacgccgccagcagtttgtgcgtggactgggtttcgtaaatcactttcccttcgacgcggccgccgctcatcccgcatttgccttcatagatcggcgagaagttggtgtaaggcacccacgcggagtcaaagtggatggatttcacatccagggttttcttgatgaagtcggtgttgtacagcagaccatcataggttgagttggtgataaccgcgtgtaccggccaggtcgcattcggcgtctctttcacacgcttggcgatagtcgcgtgctggaattcgctctgcggaataccgccgaggataccgtaggcgttacgggtcggacggaagtagatcggcgtaatgtcgctcatcatcatcaggtgagtcagcgatttgtggcagttacggtcaatcagcacggtgctgccggccggcgcggagtacatgccgacgattttgttagcggtagaagtaccgttggtcaccatgtagctgcgttctgcgttaaacacgcgagcgatatactcttccgcttctttgtgcgggccgctgtggtccagcagggaacccagttcagaaaccgaaatggagatatcggatttcatggtgttggagccaaagaaatcgtagaagatgctgcctaccgggcttttctggaacgcggtaccgcccatgtggcctggggtacagaaggtatatttaccttcacggacatatttgaacagcgctttggtcagcggcggcagaatggtgtcgatgtattcgtcagtgttctgtttgattttgttcgcgatatcttccgcagcgcccagcgcatattcgaagaagcgaacctgcatgcgcagatcgttcaggctaacgtccagagtggagtaggtgttagcgaacgcatacagcggcatgtactcgttcattttgctgatttcttcgcacagttcgagattgtatttatcccagtcgaagatcacgccgcacagacgagagttgttttcaataagttttaataagtcgtcacggtcgttcgggtagacaatacggaagtccaggcgttcgagagcacgatgcagttcacggatgggttcttctttgaagtaaacccccatgtgattcatgattgcaataacgttcatagtcaaatctccagatgtagaaagcccctcccgtcacgtgatgacaggtgatggaaggagcctcaggaaaacgggttgctgattagtgcgcgttagcggtggtgttgttatccgatgcgttgttctggcgctggtgcattttgcgaccgtagaacatcaggataatcaggctaacgatgaaagtgccggccagttcgaaggagcttgcgcccatcagcgcgatgaagcagaacacgcaacccagtaccgaacaaatcaggctaacgaagttacggatgttgatgccttcgaaacgaatcaggtcaacacaggagtagaagtaaggcagcatggtcagcagtaccgcgataccggtcagttcgccgaacaggtcagaggctttaccaccggcggagttcatcagggtaatcagcaccatcagcgcggtcattttcactgcggccagcagcaggccttttttcggaataccgttgttatcaacttcgccatacactttcgggaagttaccgtcgttggcggcacgtacaccggcctggccaaccagcatcatccacgagcccagagaagtcaggcaggcaaaggcggtgaaagcggataccatcggtgcagcccagccgccgaggatggtagaggcgctaattgcgaacggcgcaccggacgcggccatctgagaagcaggatacataccggcgataacctgagtcgcggcgatgtagacgataccggccatcgcagtgcccagcatggtagccagcggcacggtacgtttcgggtttttcaccatcccggtactcacggcggcggattctacgccaacgaaggcccacaggcagagcaggatacttttaataaccgcgtggctatcggtggtgctggaggtattccagttcgcctgataggtagcgacatcaaaccagtgccagccgacgaccgcggtcatgactaccggaataagcaccagtaccagaccaatagtggtcagacggctgacccaggtcccgccgagcatattaacgaaagtaaagatccacacgatggcaatacaggcaatacctgctggcaccgggttatttaaaattgggaagaacgtagagagataagaaactgcggtaatcccgatggccaggttaccaatccagtttgcatgataataaaggacaccggtctggaaaccgaatgccggagatatttcgccagcgtaggcaataggaccgccctgctgcgggtttttagtggccagtcgggcataaacataagccagagacatcgcaccaataattgaaatcacccagccccaaatggcaataccaccgatgctggccaggttcgcaggtaataatgcaatcccgctccccatcatattaccggcgacgacaccggtacaggcaaatagcccgatcttcttggcagaactcatggttgtttttctcctaagtttatttgggaggtacagatcatgatacagaaccattaattgacccgaccaactgccaacaagattactgatttgtacgagataagtcctaaagataaagtgatataaaaacaaacatcagacaaatgatattttgacctttttcgcttaacatataaacatgacaacagggtgtcagaaaaagataaacatcgttgtattacagatacttacaagaagcagagcgtgttatctgactgttatttaaagcctcctgaatgctaaataaaaataacaacaagaggcttcatgagaaacataaatttaacctcaccatgcccaaaaccttgcacatgatgagggtttacttattctgaagagagaaagttgtcgagatatggaacgactcggttaaccgacgtctggaaaaccccattttcaatccagtacagggtatcttcgccaggacgtaaattaaacgccgtgatgtaagaatcggcagccagacggttctcacctttcatctcatagactttgcctaacagcacataatttagccatgacatctctaaatcaatcgcactattaattgcggtatttgcttcgtcgactttgcccttccccaatgaatccaccgcttttatttgataataaatcgccatgtcttttatacccggcatcgcccctacccgctcgacttcactgtagagggcggccagctgtttatcatccagcggctgttgtgaatggcgcaatacatccaccagcgttttttcggcataggcgtaaataaaatccggcgcccgcttaatcacatcatccagcaggctactggccttacttaatgaatcgacgtcgcccttcattaacagctgatgcgactggtagaaataggttaacgccacgctttgcgagggctgatattgcctgagcatcgcctgcattcgcgccggccacggctgcgccagggcatccgacaggctgttcatcagatcgttctggatggtcagctggttatcgttggtcacaaagtagcgcttatccagcatcgtcgagctgtcggcgttgtccaccagctggaccgacataaagcactgctgcgcccgataatggcgctgattaacgaactcaatggtcagcgttttgccggaactgctcggttcattgatgttgtagtccgttttatcatgcaccataaaggtggagaaggtgttcagcgaggtggtgatcaggctggccagtcctacggcgtaggagtgctgcgacgaccagttagcgcaggagttgccattcaccaggtggatatcgatatcgcgcggattgagcagcagacgcgccttgttgaccggcggccgcgattccatgctcgacagcgccaccagcgccacgcaggtgcccagcgccaacaggaacagcccccacaccagggcggtagtgaggcgcttgcggcctgacggcgcgctggccacggtaggagccggtggcggcgcagcggcatcagggagagggacagagacgtcggatggcgcaccggcggccggcggcgcaggaacagcggtcgacggcgaaggcgtcagcgcctccatcgacggggctagctcatccccctcttcggtgcaccagatcaccggcaccgtgagcttatacccccgtttgggtaccgtcgcgatgtactcaaggctaacgtcgtcgccgtctttgagcgacttgcgcagttcagaaatactctgcgtgacgacgtggctggtcacaacgttccgggtccagacgttttcgataagctcgtcccggctaagcacttcccccggatggcgggcaaaaaagaccagaagatcgattaaacgcggttcaagggtaagctggcgccccttcctgctgatttggtttacagagggggttaccagccattcaccgacgcgaacaacaggttgtagcatacaagaaagccccagacaaaaagggaaaggcgcgatgataacacatttgtcctacctatttttgccaggggtcactccctcaggcattaggccggaattggctctttattaacaataaaaagcaataattcattaacatcgtgatcatgaaatctatatatagcgataaaaacgcatttccgctgccgctattgcctaaggcaattccgatagcagaaaaaaataagcccggaggcttaacgcgctccaggctcaatgcgttgcgcgccgatacggcacgctttaaaaaaaggttatttatacacttccgctgtggcttcaaagttagggccatgctcacgcgcagcggtgatcacgtagtactttccgcctttctcatcggccagcttggagagctgatcgtgcagatcggaaggcgaagagaattcgccaccggacggccccaccgagatcggcccgactttggtcagtttgaagtgtttcacttcttctttggtaatcaactgcgcggcggaggcgccaaatgcaacggcggaaagggctaacgcgactatcacttttttcatcctgcaatctccttggaattagccttcagtcaggccctttcagtatagacggcgatttactaagcgtgctaccgatgcgcttattttttggccgaggcgttcagtaacgcggcggtactccttccgggcgggtcttaaagcgccggtgcagccacatgtattgctcgggcgccatcaggatgcactgttcgataatctgattcatccaggccgccgtaacctcggcgctcgccagcggcggcgtgcgctccggcgtcagggagatcaattcataccccatgccgttgggcttgcgccgcggaacaaacggcacaatcgtcgccccggacattttcgccagcatccaggtaccggtggtggtcgctgcctgttcgacggcaaacagcggggcgaagacgctgctggccggaccgtagtcatgatccggcgcgtaccagagaatttccccctcttttagcgccctgaccatccctttcagattttttcgatccagcatggtcttgttagagcgcaagcgtccccaggtttgcagccagtcaatcagcgggttatcgttgggccggtagacgccaatgcctggggtaaacatgccgtacattcgcgcacccatttcgagggtcagaaaatggataccgatcagtaaaatgccctgcttttcttccagaagctccaccacctcgttaacgccgctggtctcggtccagcgcgctacccggtgcgtcggccagaaccaggccatgccggtctccatcagccccatgcccagcgattcaaagtttttcaccagcagcgcctcgcggtcggcggcgctcatctcgggaaagcagagttcgagattacgtctggcaatccgcgcgcggcttttcatcacccgcattgccagccgcccaagcgccgttcccagacggtagatcaccggatacggtaattgcaccagcagccacaaaaagccaattcccagccacaacagccagtaacgcgggtgcaacagcgcgcgggaaaatttgggtaaatttgacatagtaatcctgttaattcactcaataatagctgagcaaaaaccgcgaaataaagtagcggatcctgcacgtagtatttttccaattcgtgcggtaatactcaatcacaaagcgcgttattataagccgattccaggataaattcagcccttacgctggggactactctattattagacgcaacgcgtaaaatttcctgtttaatgcataaataaataaacctaacctctacggctcggccgattgtcgataaaatagccagtacatttgcctcagcctctcgaccaatacctcttttactcacgctttattatggcggtagcgaatgcaaacaggccgttcagaccggtctgacacggtcagcatgcggttatttgtgactggggcaaaggttaagcatcgacattgctgatccttttcccagatatgctacgtttacagcgctcattcgacgcaagtgcctttgccgacgtcgccgctttcagaagccatagtgagaaggaactatgacaatgaattatcaattagtgaagcaagtcagagaaaataacccattaagaaaaagcttcattgaccttgccgttaagacttttgacctgtcttttgaagagtggtatcagcaaggttactggaccgacgcctatatcccctatgcttttgtcgaacgcaataaagttatcgctaacgcttcggccaacatcatcgacctgcgctggcagggcgagccccggcgttatattcagattggcaccgtgatgaccgaaccggaccaccgtaataagggattagccggccagcttatccatcacatcctgcaggactggcagcaggaggcggacgccttctttttattcgccaatcccaccacggtggatttttaccccaaatttggcttcacccgcagcgaagagtatcaatatattatgccggtctccccgcgagccggtgattttcgtaaactggatatggacagccctgacgatgtcgccctgctccgccattactatgaaaaatccaacccgttctcaccgctgcgggtggagcataactttggcctgctgatgttttactgctcagcctttatgaagcattttgtctattactcggcaaaaaatgaggcggtggtcatcgccatgcaaaacggtccggtgctgatctgctttgatctattctgcgacgtgggcaagagcctgtcgacgctggtcaacgaactggccgatgaccacgtttaccaggccatcctcggttttacccccagtgaagaccggctcggcgagtatgagaagatagagggagaagatatcctcttcgtctatgaccagaaggaaaacctgtttaaagacaggaagttgatgtttcctttactggcgcatgcctgacggcgccgcgccgccaggcagatcagttataagtcaccacgaaggtcgcgctggcgttcgcttcgcccgcagtcactgcgggctgcgtctggatatagcgggcctgataggataaacgatagttcgtctgactgccttttttcccggaccagacctggctcacctggtttagcggcaccagcgagccgccggcactgaggatctgcacgccaagtccggatgccccttcaggttggtcatcgattttaatcacttcgttggcggcgacagcgctgtccaccgtcgcgttaaactgcataaacacgctgccgacattttcacagttcgtcaggttgatgttaaaaggaaccggggcggtggtgctgttgagcccggtaaatgcggttttgttatgccgtccgaggaagacgttaatgtttttactgtcgtcagtaatcttgcaggtgggtgatttgacctgaatacagagcccgctgacgctgaagcgcatcgcctgtactccgccaagataaatatcgccaaggtaatcattaaggcaatattcgcccggcggcggtagaccgccgttatcggcaatccgccagaaatagatggtcggttttttattttccgcctgaaatgcgcgctggccggaaaataccggcgcggaaggccaggccgtgaacaggggatcgaaattaatgccatcctgttcccccatctgaaagctgtagccgatgcccggcaggcggtcgatgctgtagatatcccccggcttgccgtctcccgccgggccgacccgggaaccgccaatgctctgaaacccgccgggctcgctgccgctgcaggcgatctcccagcgttcgttattagtgataatcatccctccgtagctgtatagcagggagccgatggggagatcgctgacgtcaaggttgatactggcctggctgacgttcactgaatactcgatagttttgccactgaccatctggcacgctgccgacagcgaagcgcagtacccgccggccagcagaagaggtacccctgatgcgatgatttttttcatattacttctcctttattcccggccggcagacctgatgcggcgtgccgctgctaacctgctgcaccgcgtcgtcgcggatggcataggccaaccggcagcgttgcccgctgcgttcgccccatactaccgagacgctgccgtggtcctgcggcacccgggcatacagcagcccgccctgaccgacggcgccaaccgcccgaccgttgtcgtcgaacacctccgcgcccagcgggggcgccgcgccatccggcagcgtgacatgggcaaaccagggatagccggtacgcgtgacaaatttgaccttcaccgccgcgcccgaatcgggcaccaccgtcgtgctgctggagacaatctccacatggtcgttcagaccctgcggatcgagatccagccagttagcggtaaagggatcgaggtaagggatgatcgtaaaaccctggcggttaatcggctgtccagggcggttagccacccgggcccccaccgcgccgggcgcttccacaatggcgaaggtttcccccagttcgggggtggtggtcatgccgccctgatgcgctaccagggcgcccgatgcccccagcgagtactgctgctgatggcgaccggcgctggcgctggcgttcaggtacgcataatccgtccgcaggctaccgttggccgcaacgctggcttcatttgggttctcccgcggcatgtcgtagctggcggtcaaaccgtagctgaaggcgtttttctcgcctgcgctgccggtatagctggactgcagctggctgccgtagtttttatcgtggttaaagcgggtggtcaggctgcccgcctgcccgaacggcagcgaaaaggagacgcccaccacctgattattgcggtgatggatatcctggctctgctgggcatacagataataattgagctgaccatagcggttggcatagccaagctgatatgagcgccagcggtggtggcggacatcctcactccagattccgttaaatgacagactgccgctgccggcctgctgagacaacgtcgcgctgtagcgggtcatctcccgccagtcgttggggtgccggtcgtgctcccaggcggcatcgcgaatggagcgataattgccgtcgttgctgtggctcatcgagagcagcattcgcgtatcggatgtaaacgattttgatgcggacacccgccagcggtagccctcctgccagccgtgctccctgcccttcgccgcagaacgggaaagatcgaccgccagcgcgccccagtaggtattgaaggcgctgccgaccagcgtcgagtaataatctgtcgtcgcgttagcgccggtatagccgctgatatagtcattgaagccgtactgcagcgtggcttcgccaaatcccggccgcccggcgatcccgtcctcatccagatagcccagcgacagatcataatagaccgcgcctgcccgcaccaggccaggcagcgtggcgtacggcacggtaaaggtgtcctgactgccatccgcctcgtggatcgtcacctgtaaatcgccgccggcgttggtgggatagagatcgtcgaaggtgaatttgcccggcggaaccgttgcctcgtacaacagagcgccgttctgggtgaccgttacgcgggcgttggtgcgcgccacgccgctgaccgacggcgcaaaaccgcggcgagagcccggcagcatgcgcacatcggtagccagcctgccgccgataaaactgacgctgtcaaagaaggttccgtcggtccatccctgacccagccgtaacgtggacgcccagttcactacacttctctcagcccaggtggcaatgctatcccagtgcgtattcccttcctgcgcctggtagctggactggtgatgtaaccgccagccaaaggcgcgcaggctggcatccagcccgagataatgatggctgctggtgtccccgtcgacgatgctctgatagctattggcctggtagcgcagcaccgcggcgggcacgccgctatccacctttttcaggttcaccgccccccgataatggggttgcagcagcgcctggggcatatttacccgcaggacgttttccccgctgtcatactcccagccgatcgccttatcgatctgcgaaaaacgcaggcaggtggccgcggttggccactgggcatccttcagctgcagagcgtcgaacagcgagggtgagatgcagggctcaagctggccatcgtgttcctggataacaaacgtttcttcccccaggtcccggccattcaccgagagcgtgctgcggtactgtccggcgtgtagtggattaccgtattgatatttctggagatcaacctgcgcggcgccgtgcaaatgggcgcggttaaaactaaacgcctctgccgcccatgcctcctgccagggaaggagcagcatcaacccaaccttgatctccctgagtttcataataatgtccttactgaggataattatgattcactaccgcgccgtaatcattgatggtggtgaagctgaatttggctggcagcgtgcgcagcgcgacccctttaggcgcgatctccagcgaggaaaacggggcgaccatgccggcagcgtgtttttgtccgttaagggtgatgctgtcgatggtgatatagcgcgctgaggcattgctcacccgcaacccgttgcccgtaggagccagcgcccagctcagggctttttccgcggctattttttccgccgccacgcctgccggatggtaaaacagcttgatacgcgaccgtatcgcgagctgcaggtaattgtcagtcttgccatttttcggctcaggtgggatatccagaagattgaaccagaacagcgattcccgatcctgcggcaggcggctgccgttaaacaccaggcgccagctctggccttttcccggttcgatgcgcacaatcggcggcagcacaataaacggcgccgcatccttttccggttgattttgcacgcggccatcgtcgacccagacctgcgtcagagagggggtctcccccatattggtggcccggacggcgatctcttttttgtcgccgggaaaaataatccgtgtgccgtcaataaccatgctggcgtccgccgagggtaaatagctggacagcagcagtgccagaaccatacgccgcatattcacctcctccttgtcggggggataaacggcccctgagcggggccgtggacaggggttacggatagaccaccgtaaagttgacgtaggtagcgacttttccagccgtagcggcgtcggtcgcatagtagcgggcatagaaaggcagcgaggcggaaccatcctgctcagccaccgccaccgggatcgcttccaggcgagcaactttgccgtctgcagcgaccgccggggtctccgcgaggttaatcggcgtaaaccgggtgttcagcagctccacatccacgttttctgcttccgtgccgtcagacagagtgttttttagtcgaccctccgtggaaacgtattgatctttctcgaagtacaccgagacatcagcccctggggtgcagctcgtcagatcgatggtgaagggaaccacgcccgccgtctcacccgcgctgctgagcgctgaacgctggaccgtcggtagggttaccgtcttgtctttattcactaccgtacaagtattttcgatgacttcaccattaaaggtgactttgccatcagcagcctgtgccgctaccggagaaagcatcatcatcaccacgaaagatgccattcctctgctgtattttttcatcttcactcctcatcaccacgcttatggagaatcgttcaggaaataccctggcgtactttatacgtacaatttattaatgctcagtccattggattaacctgttatcttttaaccccttccctgcactgacatcctactcacttcattatttattattcaaattcgccaccaggaccatttctactttttatagaaaagtcttaacaccactttgaaaaagaaataaaactgacacacaataaaaacacaactcactgtaaataaaaggtaatttttattttttattttctaaaaaacattcgagaaatgcgatctaactatctcaccctcattattaaccacctcctcccacgttctcccccctggattgaaagcgcagggagtatgttatttatggcgggtattctctacagtaaattgtcgaatcaggcaggacagcatgcacagcgtatttatgccaggaggtcattatgttgatctgcattgcggattcagaatattttaatattgccctgaaagcgtatattaatgaaccaaacagcaagcctctggatattaaagaaatactctgttacccgtttagtggacagagtgagatgttctatactttttttgcgaccgatgccggagcccggctaagcaccatccttattgattacagcagcgtcagcatcgaagtactgcaggtcgcgctcagtttaaaatcgtttaatcccctgatccggatctttatttttgccaaatcaggctacccgttgagcgagctcgaacgcagcctcgccattgtgctcggcgcagagttcatcaccagttttgccgggctcagcgctgcccttgcccgcggtccgcgcttgacatcgccccccgccgacaagctctatatcgccatacctgacagctataacctgacccgtaaggaaacttttttaatcagcctgctgatggggggaatgccgttgtgtcacgtggccagcaccatgcagctcaccatcaaacgggtctactactaccgttcacgcgtccttagcaagctggcggtgaaaaataacgtggaactgatgaacaaagttcaggggatggtgttgcgccactaccgacaggagacaggccatgaaatcgtatctctacgctaaaaatcgcctcatgttgattatcctgagctggctaagcgcagacgaggcgttgccatctcgtcatgatttccagcagactgaaaccatcctcagcaccctgcatataccgtatgtgctgaagcccgaccttgatcaactgagagctacgctacagccattactcgccacgcccaggccgcaggcctgtgaggtaggcgcttttctcagcgccctgttggcgctgtatacccggttaaccgaatataccgccgtcgagcactatctgctctcccggcatctctgagtagtaacccgcctgggcaggaagacgccgcgcgcctcctgcctgtaaggcattaccttagctcagcagaccgctcgccgcgtctggagacgtaatcccgatagccctcgccaacgtaaatctgccgtggccggtagatggtcagcggcgcctggtgcatctcgttccagtgcgccacccaaccgaccgtccgaccgaccgcggtgaccaccgcaaacatcgacgaaggcagattcatcgctttaaggatcaccgcggtatagaaatccacgcttggcgacaggccattgtccacaaaataggggtcggtcagcgccacgtcctcaagggccatcgccacctgcagcaggcggtcggacatgcctacctccgccagcacccgatggctggtttcacgcaggatatcggcgcgcgggtcacggtgacggtagcgcgagttgccaaaacccagccggcgaaatgcctgcggatcgcgcttcgcctggcgcagaaacgccggaacctgatcgacgctttcaatctcctccagcattcgcatgctcgattcatttgctccgccatgcatcggcccccacagcgacgccagcccggcggcgacgcaggcgaataagttcgccccggaggagcccgccgcgcgcaccgtagtggtcgaggcgcactgcccgtgatcggcatgcagcaccaggatctggttcatcgcctgctcgataaccggattgagaacgtatttttccgccgggatagcaaacagcatctgcaggaaattaccggcataggagagatcgttgcgcggatacgccgcgggttgctcaatggtgtacttgtagctcatggcggcgatagtgggcattttcgacagcagccgggtggcggccagcgcccggtgctgcggattttccacgtccaggacgtcatgataaaacgccgccagcgcccccaccagggcgcacatcagcgccatcgggtgcgaatcgcgacgaaagccgctgcacatgcgggcaatctgctcgtggaccagagtatggcgggtgatggtctcgcgaaaggtttgatagctggcctcatccggcgcgtcaccgttcagcatgatgtaggccacttcgagaaaatcgcactggcgagccagctgatctaccggatagccgcggtgcagcagcacgctgttttccgtatcgatccacgagatcgccgactggcatccggcggtattggcgaagccggggtcatagctgcagaatccggactgatttagcccgcgcatgtcgactcccaccggcccccgcgttcccggcacctgcggcagggcgatgggcggttgttgcccggcaaaagaaagcgttaacggtgtagtgctcatcctgttagtcccccagcaagcttatcagcgacctgaagtcattcttcaggcggaaagtccaacataaccaatgtgatgccgcttattcattgatgtcatcactataaccctgacaaagaggatattttgctggccttcacggggaaacaggccgtctttccccagcccaccgccggatagcggcacaaatcgccaaggataaaggcgatcatcactgtcaaaatttacgtcgagtaaagaaaggatgaagaggagctaccatgaattttgtgctgtcgatgacccttatctgcatcgccatcgcctggctgatgatgagcctcctgccggtgtagatgcaccgctaatcgccacgccagtggtctggataacccctccttcaattgatttccgccgtggtcttcgcctctgaggtttcacaagagccatataagaagtactggttgcatatcaggctgttgcgttttcccgccgaggggtaggctaaaggcccactgttaaggaggtgatatgtctggactgatcaatccacatgcggccccggaagaagcagcctatgcgctgctgattgagctcgttcgcgcccagcgcgtgccgcaatatgaaggcgaaatttccggcctgctggcgatgtacgacgaagccgttaaacactttaaagagaaagagaccgagcgttaggcgtggacatcgtggtgcgagaaaagtgtgacgcctgcggaagccgcgcaggcgttggctggatagcggcttgggtcatcagctgccgcggtaggtagagtatccgtactgactgagcagcagcgggatatgcagtttttgattttgctttgtgacattgaaaataaccggaatcaccgggaagaacgtattcatattttggcttttaaaatagtcaccggttttaaacgtcactttatacacccccggctccatattctccgcctgcggatagagcgatttaatccgcccatcggcatccgttttaccggtggcgatatgctgccagctctccccctgctgtttatccagctcaatctgcacccccggtgaagggagcccggtttgctgattaagaatgtgtacgctgagcgtcccctctggcgccgccagcgcgctgaagctgagcagagaaattacggaggcgataactaatttcataatcgtgaccttattgggcaagtgaaagtgccctaactatagtcagcgcggcggggaaaaaaattaaactttttgttatcagtttgaattgatgggtactgtctccacacacaacacgctgaaccggtttcctcgtaagaagaggaagtgtcttatgagtaggtagccccgtgctcttagtaacaggatacggtgacactaagtctatcaggcaggggaaatagatttgctgggttcaaatatcacaaggtaaaaagataaacgccgtggcctctgccgcctctaccagaacagtgcttactgcaaatgggctgcagtattcgaaataatcatttaatattatttaaactactattccagtgtaagtaatcacctggttcagatattgatcgttatcattgattctcttgtcgccacgccttaaccatctcctttgttacctctttcttgtagcaaataggtgagtacccaccagctttgctccaggcactgcggccaccgcacgagctgccgttccgggcggtattgaagggacaggcacaagtaccggggtaggatgcgacagagtcatcaataatcctttgactgacctgatcatcgcttaaggaattcgatttggcgatggaaatatctgatgcaaagacgcacacaacagcgaatacggagatggcgacgaatttgatgttcattcggatctttccaggcagtggatgaacatcgagggtatgctttcaaatagtgttcaatattgatctataacaactgtacttcacgccagcttaaaatgcgatagttaacccagtcagacagaacctaaagctataatgactattagcctgttaccggcaacatattttcacattcctgcagagcgcttattctgcactcagctataaccagcattaaccattctgttcgatattacagagcagtaatgctgtactctgactggccatcgtccgacagatactacaagacattagaatcatcgaaatggtccgtcgatatgctcacctggcacctaaccatttaactgagcacgcacgtcaaattgactcaatttttgcaaatttttgcagaagatgtcccaaatatgtcccacaaggaaaaatcagcgactggaggaagttgataagtgattgattattaaatggcacgccctacaggattcgaacctgtgacctacggcttagaaggccgttgctctatccagctgagctaagggcgccctgagaagcgagtgcttcgcggagtgaaacgcgtggaattatacggtccacgtcggttgagtcaatccattttgccaggaaactgcgggcttatacgacgctggcgaaatatcctccaccaactgtacaagaagcataccgccgggcctaatgcgcgcgtaaatcgactcagtggccaggcgcaacgcacttataaccatgtaataactatggccataacaggctaaattagcctcagacaggataaaacagcaaacgaggactgacagcgaggcccgcttctgacaaaatatcctcatccccctttcgtaaagatacagatggaatcctctctctgatggcagcaaaaattattgacggtaaaacgattgcgcagcaggtacgctctgaggttgcggaaaaagtgaaggctcgcgttgcggccggaaaacgcgcccctgggctggccgtggtgctggtcggcagcaacccggcctcgcagatttatgtcggcagcaagcgcaaagcatgtgaagaagtgggcttcgtctcccgctcttacgatctcccggaaaccaccagcgaagccgagctgctggagcttatcgacactctgaatgccgataagaccatcgacggtattctggttcagctgcccctgccggcagggatcgataacgtcaaagttctcgagcgcatcgcgccggataaagacgtcgacggcttccatccttacaacgttggccgcctgtgccagcgcgcgccgcgcctgcgtccatgcactccgcgcggtatcgtgaccttgctggaacgctacaatatcgacacttacggcctcaatgcggtggtcattggcgcctccaatatcgtcggtcgcccgatgagcatggagctgctgctggccggctgcaccaccaccgtcacccaccgctttacaaaaaacctgcgccatcatgtcgaaaacgccgacctgctgatcgtcgcggtgggcaaaccgggctttattcctggcgagtggattaaagaaggggcgattgtggtcgatgtcggcatcaaccgtctggaaagcggcaaagtggtcggcgacgtggtgtatgaagatgccgccgaacgcgcgtcctacatcaccccggttcccggcggcgttggcccgatgaccgtcgccaccctgatccagaacacgctgcaggcgtgcgaagagtatcacgacgttgaggaggcctgagatggcgacattttccttaggtaaacacccgcacgttgagctgtgcgatctgctgaagctggaaggctggagcgaaagcggcgcccaggcgaagatcgccatcgccgacgggctggtaaaagtcgacggcgcggtggaaacccgcaaacgctgcaaaatcgtcgctggtcagacggtgagctttgaaggccagagcgtgaccgtcacggcctgacaacgaaaataaaaacgcccgcttttgcgggcgtttttttatggcttacttccggcgccaggtggtgccctgcgggccatcttccagcacaatgcccatctcgttgagacggtcgcgcgccgcatccgccgccgcccagtctttcgctttgcgcgcgtccagacgctgctggatgagcgattcgatctccgccacttccgcgtcgtcaacctgcgcgccgctctgcaggaacgcttccggctcctgctccagcagacccagtaccgcagcaagcttacgcaggtgggccgccatggcgttcgccgcggccgcgtcctcggttttcagacggttcacttcacgcgccatatcgaacagcaccgagtaggcttccggggtgttgaagtcgtcgtccatcgcctcgataaagcgtgcttcgaaggcttcgccccccgccgcgtcggcggatttgtccgtcccgcgcagcgcggtgtacagacgctccagcgccgaacgcgcctgcttgaggttctcttcgctgtagttcagctggctgcgatagtggccggacatcaggaagtagcgaatcgtctccgcatcgtaatacttcagcacgtcgcggacggtaaagaaattacccagcgatttcgacatcttctcgcggtcaaccatcaccatgccggagtgcatccagtagttgacgtattcgccgtcgtgggcgcaggtggactgggcgatttcgttttcatggtgcgggaacatcagatccgaaccgccgccgtgaatatcgaagtggttgccaagctgcttgcagttcatcgccgagcactcgatatgccagcccggacggcccgcgccccacggcgacggccagctcggctcgccctctttcgacattttccacaggacgaagtccatcgggttacgcttgacgtcaaccacgtcgacgcgcgcccccgcctgcagttgatcgagatcctgacgcgacagcagaccgtagttcgggtccgtcggcacgtcgaacatcacgtcgccgttatctgccacgtaagcatggcctttggcgatcagctgctcggtgatctcaatgatctccgcaatatggtgcgttgcgcgcggctcgctgtcgggacgcagaatattcagcgcgtcaaaatctttgtgcatttcggcaatcatgcgatcgaccagcgcgacaaagctttcgccgttttcattagcgcgcttaatgattttgtcgtcgatatcggtgatattgcgcacgtacttcagcttatagccgagaaaacgcagatagcgcgctacgacgtcaaaggagacgaaggtacgtccatggccgatatgacagagatcgtaaacggtaataccacacacgtacatgccgacttccccggcatggataggtttaaattcctctttctggcgcgtcagtgtattaaaaatttttaacatcgaagattccgtgtagacgtgtgtgggtaatgaagtctctataatacccataattcagaccggacgcagcacacattgcaaggtgcatcgacccccgcggttatgctataacacccccctatatctcacccgacaccgggtgctagcaccacactcatcggaacaggatgcaaaaatggttactttccacaccaatcatggcgatatcgtaatcaaaacgtttgacgacaaagcgccggaaacagttaaaaacttcctggactactgccgcgaaggtttctacgacaacaccattttccaccgtgttatcaacggcttcatgattcagggcggcggttttgaacctggcatgaaacaaaaagcgaccaaatctccgattcagaacgaagcgaacaacggtctgaaaaacacccgcggcacgctggcgatggcccgtactcaggcgccgcactctgccaccgcgcagttcttcatcaacgtggttgacaacgacttcctgaacttctccggcgaaagcctgcagggttggggctactgcgtcttcgcggaagtggttgaaggcatggacgtggtagacaaaatcaaagcggttgccaccggccgcagcggcatgcaccaggatgtgccgaaagatgatgtgatcatcaaaagcgtcaccgtcagcgagtaattcgtggcgacactttttattgcagatttgcacctgcaaacagaagaaccggcgatcaccgccggttttctgcgttttttacagggcgaagcccgccaggcggacgctctgtatatccttggcgatctgtttgaggcatggatcggcgatgacgatcctaacccgctgcaccaacaaattgcctcggcaatcaaagccgtcgtcgacgccggcgtgccgtgctacttcatccatggcaaccgcgattttctcgtcggccagcgctttgcccgccagagcgggatgatcctgctcgccgaagaagagcgactggacctctatggccgtgaagtcttgatcatgcatggcgacacgctgtgcaccgatgaccaaggctatctggcgtttcgcgccaaagtccacaccccgtggatccagcgtttgttcctggccctgccgctgtttattcgccatcgcatcgccgcccgcatgcgcgccgacagcaaagccgccaacagcagtaaatcaatggaaattatggatgtgaatccacaggcggtagttgacgcaatggagcggcatcacgtgcagtggctgatccacggccatactcatcgcccggcggtccatgaactgcaggccaacggccaacccgcatggcgcgtggtacttggcgcctggcacagcgaaggttcgatggtcaaggtgacgccggacgacgtcgaactaatccactttccgttctaattcctgcgcgagcacaattccgaaagcgccttttgcccgggcgaaggtgcgcgcttccccccgccctgcatgctagtcttccacaacgtcactctcaaggaacgagcatgagcaggaaaaagtggagtcagccgctgatgtggggaatgatcatcgcgatcctcaatccgttaggggtaagttatatcgccttaatcggcgtcgttatcggcaacacgctgacgtttgtctggtgtgcgatgctggcgtgggctatctatttttatgccatttatttgctctgcacccgccctcacgatagccggctggtacaaatctatttactgcttatgggcaccctgatgctcccatggggggtagtgctgcttatcacctgtatcatgagggagataaaggtcaatcaggcacccacgccatcacctccaggcgagacaaaagacggctaaccatgcgcacgcaaccgttttccttgctggcagttcatgctattctctgtggcctctaaagcagtgtgaaacacacccacaggagttttaagacgcatgtcttcccgcaataattcggcgcgtatcgccatcgtgatggggtccaaaagcgactgggctaccatgcaatttaccgcagaaatccttgatgccctgaacgttccgtaccatgtcgaagtggtctccgcccaccgcacgcccgataagctgttcagctttgctgaaagcgccgaaagccacggttatcaggtgattattgcaggagcaggcggcgcggcgcatctgccgggcatgattgcggcgaaaaccctggtgccggtgctcggcgtaccggttcagagcgcagccttaagcggtgtcgacagcctctactccattgtgcagatgccgcgcggcattccggtcggtaccctggccatcggcaaagctggcgctgcgaacgccggcctgctcgccgcgcagatccttgcccagcatgatacagaactgcaccagcgcctgagcgcctggcgtcaggcgcaaaccgatgaagtgctggataatccggatccgcggggtgcggcatgaaacaggtatgcgtgctcggtaacggccagttaggccgtatgctgcgccaggccggcgagccgctgggcatcgccgtctggccggtggggctggaagccgacccggaagcggtgccgttccagcagagcgtcatcacggcagaaattgaacgctggccggaaaccgccctcacccgcgagctggcccgccacccggcgttcgtcaaccgcgatgtcttcccgattatcgccgaccgcctgacgcaaaagcagctgtttgacaagcttggcctcgccaccgccccgtggcagctgctggcggataaaagcgagtggccggcggtgtttgcccgccttggcgaactggcgatcgttaagcgtcgcgttggcggttacgacggccgcggccagtggcgtctgcgggaaaacgagatcgatcagctaccggccgataactacggcgagtgcatcgtcgagcaggggattaacttctccggcgaggtatcgctggtgggcgcccgcgctcatgacggtagcaccgtcttctacccgctgacccgtaacctgcatcaggacggtattctgcgcgccagcgtcgccttcccgcaggccaacgctcgccagcaggaacaagcggaaagcatgctgacggcgatcatgaacgagctgaactacgtcggcgtgatggcgatggagtgcttcgttaccgccgaggggctgctgattaacgagctggcgccgcgggtgcacaacagcggccactggacgcagaacggcgcgtctatcagccagttcgagctgcatctgcgggcgattaccggcctgccgctgccgccgccggtggtcaacagcccgtcggtgatgatcaacctgatcggcaccgatcttaactacgactggctgaagctgccgctggtgcacctgcactggtatgacaaagaggtgcgcccgggtcgtaaagtcggccacctgaacctcaccgacagcgataccgatcgcctgagcgcgacgctggaagcgatcaagccgctgctgccgccggagtacaccagcggcctgttctgggcgcaatcgcagctcagctaagcccttcgtgccggggatttgatctatccccttccccggcacaccttgaggcgcgtacaatcccccccttgctgtaaagctcatttctgttttgacttcagaggataccccatgaccaatgggacggattatcgcgccattctcgccagcgatacgccactgattgacgtacgcgccccggtggagtttagccaaagcgcgatgccggcggcgatcaacctgccgctgatgaatgatgaagaacgcgccgcggtcggcacctgctacaagcgtcaggggccggaagcggcgctggcgctcggccataaactggtccagggtgacctgcgcgccagccgtactcaggcgtggctggaagcgtgcgcccgttacccacacggttacctgtgctgcgcccgcggcggccagcgctcgcatatcgtccagcagtggctgaaagaagctggcgtggattaccccctgatcgtcggcggctataaagcgctacgccaggcggcgatccaggccaccgacgaactgttgcagcgcccgatcgtgctgattggcggttgcaccggcaacggcaaaactcaactggtctgctcgcgcccggacggtatcgacctggaagggcttgctcatcaccgcggttcttcattcggtcgaaccctgcaggatcagcatccgcaggccacctttgaaaaccacctggcggtcagcctgcttaaaaaagccgaacagcagacccgctgggtgctggaagatgaaggccatatgatcggcgccaatcatctaccggagagcctgcgcctccgcatggcgcagtcgccgctggcggtggtggaagatccgtttgacgttcgcctcgaacggctgcgcgaagagtatttcgatcgcatgtatcgcgactttatcgccgcgtatggcgaagagaaaggctggcaggcatacggcgagtatctgcatcacggcctgtttgccatccgccgtcgcctggggctgcagcgttttgctcagctcactgaacggctcgatgaggcgctggtgcagcagcagcgcaccgccagcaccgaggcgcactttgcctggctggtaccgctgctggaagaatactacgacccgatgtatcgctatcagttggggaaaaaagccgggaaaattctctttcgcggcagctggcaggaggtcgcagcctggctggcgaagtaatcgcatgctctattgtcccggcttgcggcgtaaacgccttagccgggctaccggtcggcgcgatttgtagccacggtaagcgcgcgcgaccggggagttgtgaccgcttagaagtcgtagcgcagacggaccaggttcatatcgccaaggttgtcggtgctggaggtaaacacgtgttcgtagtcaacgcggaaaccgtaatccagctggaagctaatccccagaccgttatcgatacgctggtagttgcggccgttcacatattccagacggtcgcccataaagtacggctgaatagatttaacagcgtattgattgatcgggaatttatagcccgcaaaatattcaatcccccaggcgtcaccggcaaagtaattatgcacatcggttttcttggtggtgaggaagttctgataccagccgccgccgaaggagaaggtccagttatccgggctccagctcagcgcggtaccgacgatattctggtcataggttttgctgtcggcgcttgacgggtcgcgcatttcggcgcgggtgtagttccacgcggtaccccaggtcagatccttcatgatgtggtagtccgcgccaacagaaccaccgcctttacgcttgtaacgcaggccgttacccggcaggtattcgctgtcttcgaacagataagagccgtaaagatcgacatcacctacagttttcttatatttcagcatattacgtgaacgataggagccatcgtaatcgccattaataccgttccccggggcctgaccgatcatatcgtagtcccagatatcggttttcacccccaccacatcatagtaaatgctgttctgctgcccgtaggttaacgtaccccaggtatcgcttttcaggccggtatacagcatgcggcgggtggtattgttcgcgccttccgcgtagtggttatcccagtcaaacagcgccggaatgttcacgcccagctcatagtagctgatccagctaatatcatcgaacaggtagtaatccgccgcgaagcggaagcgggtgccgccgtcaaaaccgttacgcttataggagcctttgtcgccatcgccggtcatcatgttgaactgcggccggatactgccgccgacggtaaagttaagccggcttaacggatcgcccgcctgcggatcttgtttcagcagcgtaatctccgcgtgggaaggcaatgacgttaacgctaatgctgcgccgatcaagatcgccagcgcttttattgtgtgtgccatagtttttccttgattaataagccaccttatattttccagttgaatattaaccgcgaatcagcatagcgtgttgttgggtttttaatgttttgtgctcttaaaaatcaatgatttatcaatttgtgcgtttaaaataaaagcgccgccaaaaaaggcggcgcatcatcaaaatgcaatattcttactggctaaactggcggaatagcgcttttccttttaacagacgcagccccagcccgccgccgcacagggataacaacaccgctcccgtcagcggcagcaacacccacaggcgccagtccggcgcccagggaaaatcaaagactttcgtctgcagcatcgccagcgccacttccgcgcctatcgccgccaccaggccggaaaccagccccagcagggcaaactccgcccacagcgtagcgcgcagcagcgattttcctgcccccagcgtgcgccagaccaccagctcctgatggcgttgacgcataccgacctgcacctgcgccagcaacagcagcacgccgcaggccgtcaccaggcccaccatcacctccagcgcccggctgacctgggagagcacctggccgacctgacgcaggatggcgccgatatccagcagactgacggtgggaaactcgcggttcagctgggtcaacatcgcgggaccgttatcccagcggaagctggtgagccagctctgcggctgcccgtccagcgccccggcggggaaaataaagaagaagtttggccgcaggctctcccagtctactttgcgcacgctgctgaccttcgcgctgaactcctgggtatcgccggtaaaggtcactgtatcgccgatctttatccccagccgctgcgccagcccctcctcaatcgatacctcgcccgacttcggcggccagctgccggccaccagcggattatgatccggacgctgttcgctccaggtgagattaagctcgcgattcagcgcttcgtctttgttcccgtccgtggattgaccgttgatctgcgtcagacgggcccggacgatcggatagaattccgccgcccgcgtctggtgttcggcgaggaaggtcttcaccggcactatctgctcaggggcgatattgatcagaaagtagttcgggctctgcgggggcaactgctgctgccagcggtcaagcagatcgccgcgcagcaccaacaggagcgccagcagcataaacgacagggaaaacgccgccagctggctgagggtcgaccacggctggcgcagcaggcggttcaccgccagacgcagcggcaaggctttgagcgtcaggcgtttgagcagccacagcaatccccagcccaccaggccgcacagcagcgccagcaccaccgccccggccagcaccgaccacagcagcgggctgccgcccagcagccaggccaacaggcccaccaccacgacgctaaccgccgggatccagattttcaacggccagacgttagccaccacatcctgacgcagcactcgcagcggcagggtcgccagcagcagtcgatagggtcgcaggcccaccagcagggaaatgacgcctgtcgccccgatagcccacagccacggccaaccgctggcagcgggtaacgcggcgggcagcaccggtttgagcaccagcagcagcagacgctccagcgccaggcccgccaccccgccagttatcaccgacagcgtcaacagcagcagccattggccgacgataagcttgcgcagctgcgaccgtccggcgcccagcgtcttgagtatggcgaccagatcatagcggctgcggcagtagtggctcatcgctaccgccactgcggcgacggccagcagcagcgtcaacagcgcggataacaacaggaattgctgcgagcgttcgagggatttgcccagcgcgctgtcgtcctggtcaaggccaatccagcgatgctccgggccgagcttcggcagcagccactgctcataattggccagctgttcagcgtcgccggcgaacttatagcgccatgcgacgcgactgccgggctgcacggccccggtttttgccacgtcggccatattcatcatcagtcgcggcgccatctggaaggggttaaaccctgcatccggctcctgaatcacctccccggcaatgcgcagcgtggcatcgccaacgtcaatcgtatcgccggttttcaggttcaggagcgccatcagccttggcgccagcagcacgctccccgcctgcggtttcagccccggcggttgcgtctcgagggtgccatacagcggatagcggtcgtccaccgccttaacgtccgccagctgcggcgtatccccggcgaacgtcatggtggcaaagttcagctgctcgccgacggtcagccctgacttccgcgcctgtgcgatccactcggcgggtacctcgcgcgaactacgcagcgtacggtcgccggccataaattcacggctttgctggctaaggcctttctccatccgatcgcttatcgaccccagggccaacacgcaggccacggcgaggcttaacgccagccagacgatcagcagcgacggcgagcgccattcgcgccagaaccagcgggcgatcatgcttcctcccgcagctggccatccaccaggcgcagacggcgatcgcagcgcgccgccagcagcggatcgtgagtgacgaggatcagggtggtgccgtgttcgcgattaagcgagaacagcagatcggcaattttgtccccggtctggcgatcgaggttgccggtgggctcatcggcgaacagaatggccgggcgcccgttaaaggcccgggccagcgccacccgctgctgttcgccgccggagagctgcgccggcaggtggtgcagacgtttgccaagtcccagctgctcaagcagcgcgcgggcatcgccccgactctggctatcgctggcgccgcgcaacagcgccggcagctcgacgttctccagggcgttgagcgtcgggatcagcataaacgactgaaaaacaaaaccaacgtgctgcgcccgcagcgccgcccgcgcctcttcatccatccggtgcagcggtttgcccagcatcgatacttccccgctgctgccatcgtcgaggccggcgaggatcgccagcagggtcgatttaccggaacccgactcgccgatcagggcgatggtctgccgcggtttgacaaccagctcaactccggtaaggatggagagctgatgctccccctgaccgacggacttcttaagatgatgaacttcaagtatgttttccgctggcatgtgcctttcctgttgttgttcctgtttacctgccgcgcgatggcggcggacacgctgctgatcctcggcgacagcctgagcgctggctatcggatggcggccaactccgcctggcctgcgctgctcaatgagcagtggcaggcgaaaacgccggtggtgaacgccagcatcagcggcgatacctcgcagcaggggttggctcgcctgccagcgctgcttaagcagcaccagccgcgctgggtgctggttgagctcggcggcaatgacggactgcgcggttttccgccgcagcagaccgagcagacgctgcgcaccattattaaagatatcaaagcggccaacgccgagccgctgctgatgcaaattcacctgccggcgaactatggccgccgctataatgaagccttcggcgcgatttacccggccctggccaaagagttcgctattcctctcctgcccttttttatggaggaggtctatctcaagccgcaatggatgcaggacgacggcattcacccaaatcgcgacgcgcagccgtttatcgccgactggatggcgaagcggctggctcccttagttaatcatgactcctgaacgccaggggtcgctgacaggtaaagttatgcaaaaaacggttttagtgacaggctgttccagcggaattggtctggaaagcgcgctggatttaacccgccagggctttcgcgtgctggcggcctgccgcaaagcagaggatgtcgcgcggatgcaggatctggggctaaccggtattttgctcgatctggatgacccgcagagcgtggagcgcgcggcagcggaggtgattgcgctgaccgataatcgtctctacggcctgttcaataacgccgggtatggcgtctatggcccgctgaacaccatcagccgccagcagatggaacagcaattttccgctaactttttcggcgcgcatcagctcaccatgctgctgctgccggcgatgacgccgcacggcgaagggcgcatcgtgatgacctcctcggtgatggggcttatcgccagtcccggccgcggagcctatgccgccagtaaatatgccctcgaggcatggtccgacgcgctgcgcatggagctgcgccacagcggtattcaggtcagcctgattgaaccgggcccgatccgcacccgctttaccgataacgtcaaccagacgcaaagcgataagcccgtagaaaatccgggcatcgccgcccgctttaccctcgggccggaggcggtggtggaaaaagtgcgccatgcttttaccagcgataaaccaaagctacgctatccggtcaccctggtcacccacgcagtggcgctgcttaagcgcctgctgcctgcccgcgcgatggacaaaattatccacggctgagttgaagcgcggaatgccgcccccatgtaaaacagaaatcgactaacgagaaatgcccatgtccgaacagaatattgtcaacattagcgaagcgaacctgcagcagacgctacagcagtccatgaacgttccggtgctgttttatttctggtctgcccgcagccagcactgcgaacagctgaccccggtgctcgagcgcctggcagcccaatacaacggccagttcacgctggcgaaggtcgattgcgacgccgagcagatgctcgcttcacagtttggtctgcgcgccatccctacggtttatctgttccagaacggccagccggtggatggttttgaaggcccgcagccggaagaagcgatccgcgccctgctggataaagtcctgccccgtgaagaggagctgaaagctcagcaggcgctggccctgatgcaggaagaaaaatacgccgatgccctgccgctgctgaaggaagcctggcagctgtcgaatcaggaaagccagattggcctgctgctggcggaaacgctgattgctctgcaccgttccgatgaagcggaaagggtgctgaaaaccattcctctgcaggatcaggatacccactatcagggtctggtggcgcagattgagttgctcaaacaggccgccgacaccccggaaatccagcagctgcagcagcaggtggaacagaatccggaggatgcgcagttggcctcccagctggcgctgcagctgcatcaggtcgggcgtaatgaagaagcgctggccctgctgttcagccatctgcagaaagatttaggcgccggcgatggccaggcgcgcaagatgctgcaggagatcctcgccgccctcggtaccggcgatgcgctggccgccaaatatcgtcgtcagctctattcactgctgtactaatccgttgccttccccggatagcgctgcgcttatccgggctacgcgaactatgcggaacgtagcctaagtagcccgggtaaggcgtgaacgccgcaacccgggatcgttcacgggcgctttttcagctgcgtcaccaccagctgatggcgggcgttgaagaacttccggtaggtcagatagccggcgataatcgtcgacaggctggcggtcgacagcagcataaaggtcaccatgatctggtacttaatcgccttcaccgggtcaataccggcaaaaatcagccccgacatcatcccaggcaagctcaccagaccgaccgttttcgccgaatcgacggtgggaatcaatgacgcgcgaatgctctcgcgaatcagccgcgctgaggccatcttcggcgtcgcgccgaggctcagtttctcctgaatctgctgctgctcgctgctgaagcgctggcccatattgttgtagcacagccctaccgccaccatggcgttcccggccaccatcccggcaatcgggatcacctgcatcggcacgaaggcgatcgagccagaaaacaccagtaccgccagcgttagtccagcgccagtagtgatggcgataaacgacgagataaaagctttgtcgatatatttactgcgcttcttcgcattccacgccgcgttaaagcagataaacagcaccatcaacagcgtcagaaccgcatgattgacgttaaagatatatttcagcacatagccgacgattatcagctgcacgatcgcccggcaaatactccagataatatctttttccagcgccagcttttcccgatagctgaccagaatagcgatcagcaccagcaccatcgacagcgccagcgattcgttcgtaatgttatgcccgttcatgctgtacctcctgcatatttccgccggcaggttgcagcgtaatcacttcatcggcatgcgaaatttcattgcgatcgtgggtgacccacagaacagcgacctgtttttccgttgcgtagccatgaataatttcattcacattctgtttattactttcatccagcgcgctggtaatttcgtccagcagcagcacgcgcggcagaaattgtagattgcggatcagcgatacgcgctgcttttccccgccggagagttcattaatggatttttccagcatattttcgtcaaggccaaagcgctgcaggtcggccagcagcgcctgcggatccggttgtttattgcggatctgccacggaaaaatcagattatcgtaaaccgaatcaccgaacagggccggcgtctgcgcgcagtaagagacctgttggcgatatctttccggcgacagcgtcgcgacatccgcatcgtcgaagaacaggcgcccggaggttgggctgagcagcgaggcgataatcttcagcaaggtacttttcccgcagccggaagggccggtaatcaacttgaattctccggcgcgaagctgaaaattgatattgtgtaaaataacggcgtcgtcggtcttaaaccccacaccgtcgagacgcaaaagcgcgttattttccttcatgagtcttcctgattattttctgaaacaccgctagtttaccgcactttcctttctccaggatgaggagaaagatatactcagtttaaacatgcgctatttccttgtagcgccccgccaggcaacaagacaggaggtttttgatgctgatttttattcctatccttattttcgtcgcgctggttattgtggccgcggcggtgaaaattgtcccgcagggctaccagtggacggtggagcgcttcgggcgttttacccagacgctgcagccgggattaagcttagtcgtgccgtttatggaccgtatcggccgcaaagtgaacatgatggagcaggtgctcgatatcccctcgcaggaggttatctcccgggataacgccaacgtcaccatcgacgcggtctgctttattcaggtgatcgacgcgccaaaggccgcctacgaggtcagcaatcttgagcaggcgatcgtcaacctgacgatgaccaacatccgtaccgtgctcggctcaatggagctggacgaaatgctctcccagcgcgacagcattaacacccgcctgctgcatatcgttgacgacgccaccaacccgtggggggtgaaaattacccgcgtcgaaattcgcgacgttcgcccgccggcggagcttatcgcctcgatgaacgcccagatgaaagccgaacgtaccaaacgcgcgtacatccttgaggccgaaggggtgcgacaggcggaaattctgaaagcggaaggggaaaagcagtcgcagatcctcaaggccgagggcgaacggcagtccgcgttcctgcaggcggaggctcgcgaacggtccgccgaagcggaagcccgcgccacccaaatggtctcctcggcgatcgcctcgggcgatattcaggcgatcaactacttcgtggcgcagaaatacaccgatgcgctgcagcagattggcgccgctaacaacagcaaagtggtattgatgccgcttgatgccagcagcctgatgggatcgatcgccgggatcagcgagctgatcaaagaaggcgctggcgatcggaaaaaatcatgatcggcatgatcctcgcacacccccatctgttctggctaagcctcggcgggctgctgctggcggccgagatgctgggcggcagcggatacctgctgtggagcggcgtcgccggcgtggtgaccggcgccctgacctggctcctgccgctgagctgggaatggcaaggcacgctgtttgccgttctcaccctgctggcggcgtggctgtggtcgaaatggctgcgcaagcgcgtcaaaacgcagcgcccggccgatgcccagctcaaccagcgcgggcagcaactggtgggccgccgcctgacgctggatgccccgctggtgaacggccgcggccacgtccgcgtgggcgacagctcctggccggtgattgccgatgaagacttcgcggcgggcagcaaggttgaagtgattgccgtagaagggattacgctacgaatcagacccgccgtccgttaagcctgcgccttgcgatggcagcagccggaaagattatcgataatcgggcactccgcgctgtcgtcgccggggcaggattcggccagcgccagcaggtgcgcgcgcatattttgcagctcgcggatatggttctcgatatccgccactttctccagcgtgcgttttttcacatcggcgctgtgccgcgacgggtcgttgaacagggccaccagctcgcggcactcttccaggttaaaccccacctgccgcgcctggcgcagcagcgtcagctcatcgagatgctgctgactataggtgcggtagccgttttcgctccgcaacggcggcgtcaccagccccttctcttcataaaaacgaatcgctttgctggttaagccggtttttttcgccacatcgctgatattcattttttctccttgaccttccccttgctggaaggtttaaccttcttaatactcgatgaaagagtgggtctggtcaatcgttgaccggaaaattattcaggagttatttatgtctaacactatcgacctgacgctggatggcctctcctgcggccactgcgtcaaacgcgtgaaagagagtctggagcagcgtcctgacgttgagcaagcggaagtcaccctcactgaagcccatgtgacgggcagcgccagcgcgcaagcgctgattgataccgtgaaacaagccggatacggcgcggagctcagccacccaaaggctaaaccgctggcagaatcatcaatcccgtcggaagcactgacagcggccactcctgagcttccggcagcccatgacgaagatgacagtcaacagctgctgatcaacggcatgagctgcgccagctgcgtctcccgggtacaaaacgcgcttgccgcggtgccgggcgtctcacaggcgcgggttaacctggcggaacgcacggcgctagtgatgggcagtgcgtccgccgcagaattagtgcaggcggtggagaaagccggctatggcgcggaggcgatcgaagacgatctgcaacgccgcgaacgccagcaggaaaccgccctcgcgacgatgaagcgttttcgctggcaggcgattgtcgccctgctggtcggcgtgccggtgatggtctggggcatgatcggcgataacatgatggtcagcgacgaaaaccgttcgctgtggctggttatcggccttgtcaccctcgccgtcatggtcttcgccggcggccacttctaccgcagcgcgtggaaaagcctgaaaaacggcaccgccaccatggacacgctggtggcgctcggcaccggcgtcgcctggctgtactcgatgagcgtcaacctgtggccgcagtggttcccgatggaagcccgccatctctattacgaagccagcgcgatgattatcggcctgattaacctcggccatatgctggaggcccgcgcgcgtcagcgctcctcgaaagcgctggaaaaactgctcgacctgacgccgccttcggcgcgggtcgtcacgcccgagggcgagaaagatctgccgctcgcggaagttcaggccggcatgacgctgcgcctgactaccggcgaccgcgtcccggtcgacggcatgataagccagggcgaagcctggtttgatgaagcgatgctcaccggcgaaccggtgccgcagcaaaaaggcgatggcgacgccattcacgccgggaccgtggtgcaggatggcagcgtgctgtttaccgccagcgccgtcggcagccagaccacgctggcaagaattatccgcatggtacgccaggcgcagagcagcaaaccggagatcggccagctggcggataaaatctccgccgtatttgttccggcggtggtcgtcattgcgctgattagcgctgcgatctggtacttcttcggcccggcgccgcagatcgtctataccctggtcattgccaccacggtactgattatcgcctgtccgtgcgccttaggcctggcgacgccaatgtcgattatctccggcgttggccgggcggcggagtatggcgtgctggtgcgcgatgccgatacgctgcagcgcgccagtgaactcgacaccctggtgttcgataaaaccggcaccctgaccgaaggcaagccgcaggtggtggcggtgaaaactttcgctggcgttgatgagcataccgcgctgcgtcttgccgccgcgctggagcagggctcaagccatccgctggcgcgagcgatccttgataaagctgccgacggcccattgccggaagtcagcggcttccgcaccctgcgcggccttggcgtcagcggcgaggcggaaggtcatcgtctgctgctcggtaaccaggcgctgctcaacgagcagcatatcaataccgccgaggtggaaagcgagatgacagcccaggcctcacgcggcgccacgccggtgctgctggcggtggatggtcaggccgccgcgctgttcgccatccgcgacccgctgcgcgtagacagcgtcgacgccctggcgcgtttgcatcggcagggctaccggctggtgatgcttaccggggataaccccaccaccgcgaaggctatcgccaaagaagccggcattgatgaagtgatcgccggcgtgctaccggacggtaaagccgatgccattaagcgtctgcagagccaggggcacaaagtggcgatggttggcgatgggattaacgacgccccggcgctggcccaggcggatgtcgggatcgccatgggcggcggcagcgatgtcgctattgaaaccgcggcgatcaccctgatgcgccatagtcttcacggcgtggccgatgcgctggcgatttcgaaagcaacgttacgcaatatgaagcagaacctgctgggcgcgtttgtctacaactcgctgggtatcccgattgccgccgggatcctctggccgctgaccggcaccctgctcaacccggtggtcgccggcgcggcgatggcgctgtcgtcgatcaccgtggtgagtaacgccaaccgcctgctgcgctttaaaccaaaagagtaaacgccgtcagatgaaacgggcgccgacgttgttcggcgcccgtttttttgccgggacaagaaaagcccgccggaagggtgacgtgtatcaccatatgcgctagcatgaagtcctcacacttcggagcgcgtatgggcctgttaaaccggataaaaatgctgtggcgagccgccgtcggctcgtcttattcctggcctgcgatggatatcgtcctacccggcgaacgctatttgcacctcgtcggcagtatccatatgggcacccgcgacatggcgccgccgccggcgaagcttctgaaaaaaatacgccaggcagatgcgttaatcgtcgaggccgatatcagcggcaatgaaaccccgtttagcaatctccccacttacccaccgctggcggaacgcctgagcgatgcgcagctgagcgagctagaggcgcgagccggcgagctgggcctgtcggtcgggctgttcgacagccagccgctgtggcaggtggcgatggtcctgcaggccacccaggcgcagaaactggggctgcgaccggattacggcatcgattatcagttgctgatggccgcccgcgagagcaacatagcggtgatggagctggaaggcgccgacagccaaatcgcgctgctgcgcgatctgcccgacggggggatggcgctgctggaggatacgctgacccactggcgcaccaacgcccgtttactgcaggtcatgatcggctggtggctggagcaaccgccgtcgcgcggcgcggtatcgctgccgacgacctttagccagtctttatatgatgtgctgatgcaccagcgcaacctcgcctggcgcgagacgctgctggccttgccgccggggcgctacgtggttgccgtcggcgcgctgcacctgtatggcgaagggaatctgccggatatgctgacataaaaaaaatggccaatattgctattggcccgtcaaagaggaatttcatcattattattatcccgggatttgcatcccggatcgtctgattgtcgctcaaagtgaccatcactgccaacactattgcgcaagatggtactattttttagacaacctgcgggcgtattctgacgtcacgcaaaaccggttggtaagaaggatagctatgactcccgccgttaaattactcgaaaaaaacaaaatttcctttcagatccacagttacgatcacgatcccaatgagaccaacttcggagatgaagtggtgcgcaagctcggcctcaatgccgaccaggtttacaagaccttgctggtcgccgtgaacggcgatatgaagcatctggcggtggccgtcactccggtcgccgggcagctggatttgaagaaagtggcgaaagcgctgggcgccaagaaagtcgacatggccgacccgatggtggcgcagcgtatcaccggctatctggtgggcggcatcagtccgctggggcagaagaagcgcctgccgacggtgattgacgccccggcgcaggaatttgccaccatctatatttccggcggcaaacgcgggctggatattgagctggcggcgagcgatctggcgcagcttctcgatgcgaagttcgccgatatcgcccgccgcgattgataaaacgatcccggatagcggcgcacgcgccttatccgggatacccaactcgtagccccggtaagcgtagcgccaccggggaaatagccaacctgaagcccaggcttactgccagctcacctcgcctttcggctcataggcggcggcatccagcggcgagttcttctcgatatactctttcagcacttcggcatcgataaagccggtattcacatacccgggtttatcggcgatgttcggatagccatcgccgccggtggcgttaaagctcagcgtcgccatccgataggtcttcgccggatccaccggttcgcctttgattttcagatcgttcagcttaccgtctttggccacgaaactgacgttggcaaactgcggataagcgccggaatccggcttcatctgcgcgacggcggtcaggtaatccactacctccttgccgttcatatcgacataggtcagcacattgccgaacggctggaccttcatcacatctttgtaggtgatatcccccgcctcaatggagtcgcggatcccgccgccgctcatcaccgcgaaatccgcgttgctgcgcgccatttgcgccgccagcagcaggtggcccatattggtctgcacaaagcgcactttactgcggtcgccctccagatgaccattcacgctgccgattttgacctgcagctgcgccttgcctttgttctggaacggcgtcagcagcgacatcatctgcgggttctcggcgatctgcggcgtatacagcacccgctcgctttggccgttatcgtaagtcacttttttcttcaggttgaccgggatcagctgatagtgcaccagcttcatctcgccgttgcggaactcaaaatcggcgcggccgacgtatttgccccactcatgcgcctggacgatccagatgccgttctgacgatccggagcacacggggtgcctggcacataatcgacctgctttttattttccgccgccatgcataccggatcctgcgaatgaccaccgacgatcatcgccagcgatcccgcaggtaaactccgcgccatttcaacgtcgcccggcgcgttagagccgtggttgccattgtcgtaatggcccatatgggtggtggccaggatcacgtccggcttttcattctgctgcagctcctggataaccagcttcgcctcttccgccggtttgcggaattcaatatcggtgaaatattccggattgccaatcttggccgtatcgtcggtggttaagccaatcaccgcgattttcagcccaccgcgcttaaacaacgcccagggtttgaacagccgttcgccggtgcttttctgataaatattggccgacaggaacgggaacttagcccacttttcctgctggcgcagtacgctcagcggattatcgaattcatggtttcccaccgccatcgcgtcgtagccgatcaggttcatgccgcgaaaatcgggctctgcatcctgtaaatcagactccggtacgccggtattaatatcgccgccggataacagcaggacgcttcccccttccgccgccacctctttccggatgccatcgaccagcgttttctgcgccgccaggccatattcgccgtagtcattgcgccagaaatggccgtggtgatcgttggtgtgcaggatggtaattttataggttttatcctgctcataggcctgtgccgacaggctgcccagcgataaggcggcgaataacgccagcgctacgctgtgtttgaaataatgcatgcttcactccctgacttaatcccaagtgccgaaagtatagcgagttagtcgcgttgacaaatatgttttcagaattgcgacttccttcaaaccttatcagcaggtatgttagttggataataattctacctgcatcctctatacgccttcgcgttgtatggcattgcgtcagcccgttcgtcatatttcccatgcagtagccgggaaaatcagggcagtcgccatggcggacaaaagacgaaagctatataaaaaagtgacgtgaacctatggcaatcaatcagaccgctcaacccttgtccggccccgctgcgccgccgcaaaaagcacgcacctcgtttggcatcttaggcgcgatcagcctgtcccatttgcttaacgatatgatccagtcgcttattctcgctatctacccgctgctgcaggcggagttctcccttaccttcgtgcagatcggcatgatcaccctgaccttccagctcacctcatcgctattccagccggtgattggctacatcaccgataaacgctcaatgccgtggtcgctgccggtgggcatgtgcttcaccctctgcggtttgattctcctcgcgctggccggtagcttcggcatggtgctgctggccgccgcgctggtaggtaccggctcctcggttttccatccggaatcgtcccgcgtagcgcggatggcctccggcggtcgtcacggcctggcccagtcgctgttccaggtgggcggcaacttcggcagctcgcttggcccattgctggcggcggtgatcatcgccccgtacggcaaaggcaacgtcgcctggtttgtgcttgccgctctgttggctattgtcgtgctgtcgcaaatcagccgctggtatgccgcgcagcatcgaatgaataagggcaaaccgaaaccggccatcgttaatccgctgccgcgcaagaaggtcattctggcggtaggcattctgctgatgctgattttctcgaaatatttctatatggcgagcattagtagctattacaccttttatctgatgcataaattcggcttaacggtgcaaaacgcccagcttcatctgtttgccttcctgttcgcagtggctgccgggacggtgattggcgggcctgttggcgacaaaattgggcgtaagtatgtgatttggggctctatcctcggcgtagcgcctttcaccctcgttttaccctacgccagccttgaatggacgggtattttgacggtgatcattggttttatcctcgcctcggccttttccgctattctggtctatgcgcaggaactgctgccgggacgcatcggcatggtttctggcctgtttttcggcttcgcctttggcatgggcggccttggcgccgcggtgttaggcctgctggcggaccataccagcatcgatctggtttataaaatctgcgccttcctgccgctgctgggattcctgacgatattccttcctgataaccggcaaaaagcctgattattcggcggccaaagtgcaaccctggccgccgttaacccttgtgtcatcagcctgttccacgatttccccccgccattttcccttctgtgccttttcatcggctaattgcatttttttgcacaactcaagaattattcataaacaaagtgaacgtttttgtcataaactattacccggacagggtagcaaaatggaccgatacaccactggaaaggagacggaatgcaccacgcaacaccgcttatcaccaccattgtcggcggcctcgtgctcgcctttattctcggcatgattgccaataagctacgtatttctcctctggtgggatatctcttagcgggcgtgctggccggacctttcacccctggctttgttgctgacaccaaactggctccggaactggcggaacttggcgtcattctgctgatgttcggcgtcgggctgcatttctcacttaaagacctgatggcggtaaaatcgatcgccatccccggggccatcgcccagatagccgtggcgacgctgctgggtatggcgctctccgccgccctcggctggtcgctgatgaccggcatcgtctttggcctgtgcctctccaccgccagtaccgtagtgctgctgcgcgcgctggaggaacgacaactgattgacagtcagcgcgggcaaatcgccatcggctggctgattgtggaagacctggtgatggtcctgacgctggtcctgctgccggcgattgccggtatggcggagaaaggcaacgtcggcttcgtgtccctggccctcgacctcgggatcaccattggcaaagtggtggcctttatcgccattatgatgctggttggccgccggctggtgccgtggatcatgtcgcgcagcgccgccaccggctcacgcgagctgttcactctgtcggtgctggccctggcgctgggcatcgccttcggcgccgtggagctgtttgatgtctcttttgccctcggcgccttctttgccggcatggtgcttaacgaatccgagctcagccaccgcgccgcccatgacaccctgccgctgcgcgacgccttcgcggtgctgttcttcgtctccgtcggcatgctatttgacccgatggtgctggtccaacagccgctggcggtgctggcgacgctggcgattattatctttggtaaatccgcagccgcctttttccttgtgcggatgtttggtcactcgccgcgcaccgcgctgaccatcgccgccagcctggcgcagattggcgagtttgcctttattctcgccggcctgggaatggcgcttaacctgctgccgcaggccggacaaaatctggtgctggccggggcgatcatctcaattatgctcaacccggtgctgtttaccctgctggaaaaatatctcgataaaaccgaaaccctcgacgagcagacgctggaagaggtcctggaagacgagaagcaggtgccggtcgatatctgcaaccacgcgctgttggtcggcttcggccgcgtcggcagcctgctgggcgagaagctgatggcccaggggatcccgctggtggtggttgaaacctcgcgcacccgcgtggatgagctacgcgagcgcgggatcagcgcggtgctcggcaatgccgccaatgaagagatcatggagctggcgcatctcgattgcgcccgctggctgctgctgacaatccctaacggctacgaggccggagagattgtcgcttccgcacgggaaaaatgtccgaatatcgagattatcgcccgcgcccattatgatgacgaagtggactacattatcgatcgcggagccaatcaggtggtgatgggcgaacgggaaattgcccgcgccatgctacggcttctggaaacgccaccggccggcgaagtggtcaccggctgatgtactgccctctccccgccgggagagggacgcgcttaccgatcccagtacgcctcttccaggctgtcctcacgctccggcaggccgcgggttaaacgcggcgagtgctggttcagcacctgatagctcacgcggttggcatatttacacacctgcgccagcgaggagtaggtcagccatttgcatttgtgcttgctggagttggggacgttattgcggtggtagttattggcggtgatgtcatgcagcagcgccgccagcgcgccgtcgcctgcgccgttggtgttcatgatcttctcggggccgcccatatagggagcgatatgggaatatatgcgcagcggattaacgcaatcctggtgacgcatcgcgcggctgaattcaaactggttaaactccgggatcgcccccggcagcagcggatgctgggttttccgcttcgcctcttcttcggtgaagcccgccatatacaggcccgccgggccggcggtgcacagcaccaggtcgacccagtccagcgccttattcgccgctgaaagcggatcggcaaagccggtcagcgcttccccttcctcttcgttcattgccagaatagagacatgctcctgcaggaactcctgccaccacgccgggttatcggcaatcacgtatttggttccgagggttaacaccaccggcacatcgtgctttttggcatactcaatagccttcatcgtcgcgtccggcatcggctcgcccggcttgcagcgaaccaggtaagaggtcagcaccagcgccgaggcgccggcgatcaccgcttccggaatgctttccggacgcagcttgttcatgtggcccgggctgatggcgaaggtgcgctcgccgctgtcaccgatcagggtaaagcagcggccaatggcgccgtcgacgccctgcagatagttcagatcggtgcggctggaggtattgcacaggtaacgataggcatagccgccgatttcgatattgctgcacatcacgccaagcagcaccgagcgatcgtccgccagcaccgagtagttgtgcatggtattgccgatggtgccgccggcaaactgatgggtaatgagattgttgcgcaccagctcctggtacagcgcctcggcgacgtcatcttcaatcaccagcgaatggcccgcgctcaggccgtagcgcacgataaacgcctcatccactttcgcttcgatatccaccagcgtctggtcgataccgaccacccaggagacgctggattcattctccggctgaatttgctgcagcagcggatcgcgggcgttaacgggaaaatagtgtttagatttgcgtttaccgggaaatttcatagtggcgcttaaataacagggaacaagcgggaaatagtagcatattccccgccctgcgcgcgatcagcgataaggcgccgtcagattgaccatcatctcaatatgcgctgcgtccgcattaagcgccggaatatattcatattgcttgccgcctgcttcgaggaatatttcccggttctggacggcgatttcttccagcgtttcgagacagtcggcggcaaaccccgggcacagcacctgaatatgcttcgtccctttctcgccgagcatctttagcgtttcatcggtgtacggggtcagccagggttcccggccaaagcgcgactggaaagtcatcatcacccgctccggcggcagccccagcgcggaaaccagttcccgcgtcgtatcgcgacagcgctgaggataatcatcgccctggttggcatagcgctgcgggatcccatgataggagagcagcagcagatccggttccccatgcaccgcgaaggaagcgcgcacgctggccgccagcgcatggatatagtccggatgttcggcatagtcgcgaataaacgagatacccggaatggcgcgctttttcgccagaatccgcgccagttcgtcccagacggcggccaccgtcgagcaggaatattgcggatacagcggcagcaccacgatgtgctccaccccctgcgccagtaagtcatccaccgcgctggccagtgacggtgaaccataactcatgcccagcgccaccggggtatccggcagcctggcagccagcgcctgctgctggcgacgactatacaccatcagcggcgatccctcttccatccacacggactgatagagcttcgccacgcgcggggagcgaatcggcagtatgacgccgcgcagcagcggccaccatagcagacgagacgtatccaccacccgtttgtcgctgaggaattgtcgcagatagcgcttcaccgccccgggggtgggcgcatcgggagtgcctaaattggccagcaagatacctgttttcgtctgatgcattaccgcctcttaaccatttgaatcgcagccaattgtagctgaaatggcgctaaacggaaccaatcatagcaaaaggtagaaatgagaggagttctcatcctgccgcagcaggatgagaaaaggctttatcagccgaggattttttccagttcggcgcgcacgtcagctaccgctttggtgccgtcgactttggcgtatttggtgttgcccgcctgcgcttctttggtgtagtagccgatcagcggcgctgtcatctgatggtattctaccagacgcttacgcacggtctcttcctgatcgtctttacgggtggtcagctcttcgccggtcacgtcgtctttgccttccaccttcggcggattgaatttgatgtggtatacgcgaccggatgccgcgtggacgcgacggccaacgatgcggtcgacgatcagttcgtccggcacgtcgaattccagcacgtaatcaacggtaatgcccgcctctttcatggcgtcagcctgcggaatggtgcgcgggaagccgtccagcaggaagccgttacggcaatcttcctgggcgatacgctctttcaccagcgcgatgaccagctcatcggtcaccagcttgccagcgtccataatgtctttcgcttgcttaccgagctcagagccggattttaccgccgcgcgcagcatatcgccggtggagatttgcggaataccgtatttctccatgatgaactgagcctgagttcctttacccgcgcccggagcgccaagcagaataatacgcattacgaaaatcccctcaaaagtcgattcaatttttcaaaaacgctaaaccataccaccagaacggcgatggctcaaggaaggcggtgcggctgaaacggttaatggtgagatattttatgcaatccaatgtgtaatgccccgcctgagcacatcgctcagacggggcatttatcccgttcccggcgtcgcgtcgctcggccgggctactcgttcaggttcgcgtcaggaagccagcagctggttcatacggcggataaactggttcggatcttccagcgtgccgcgctcggccagcagcgcctgatccagcagcagttccacccattcgccgaactgcgcgtcgtcctgggtatcggccgcgcgtttcaccagctgatgcgccgggttcagttcgaagatgtatttcacttccggcgccgcctggcccgctgccgcgaacagcttcgccatctgagtgctcatctcatcggcgtcggtggtgacgatcgccggggtgtcggtcagacgatgggtcagacgcacctctttcacccggtcgccaagcaggtttttcacccgctcaacgaacggctccagcgctttttcggcttctttggtggactcgtctacttcatccgccagcttgtccagcgactcgtcggctttagcgacagactggaacgctttgccgtcgaactcggtcaggtagctcatcatccactcgtcgatgcgatcggagagcagcagcacttcgatccctttcttacgcagcagctcgaggtgcgggctgctcttcgccgccgcatagctgtcggctgtgatgtagtagatcttctcctgaccttctttcatgcgtgagacatactcttccagcgatacggtctgcgcggaggagtcggtatgggtggtcgcgaaacgcagcagtttggcgatcgcttcctggttgctcggatcttccgccgggccctctttcagcaccaggccgaactgtttccagaaggtttggtatttttcagcgtcgtctttcgccagcttatccagcatctgcagcgcgcgtttggtcagcgcggtgcgcaggttgcgggtcacgctgctgtcctgcaggatttcacgggagacgttcagcggcagatcgttggaatcgatcaggccgcgcacgaagcgcaggtagttcggcataaactgctcggcgtcgtccatgatgaacacacgctggacgtacagcttcaggccgtgtttatgatcgcggttccacatatcccacggcgcctgcgacgggatatacagcaggctggtgtactcctgcttaccttccacgcggttgtggctccaggtcagcgggtcgctgtagtcgtgagcgatatgcttataaaactctttgtattcgtcgtcgttaacttcggatttgctgcgggtccacagggcctgcgccttgttgattttttcccacgaaatcacggtttcgccgtctttctcttcccgtttttcaatctcaaccggcagcgcgatatggtcggaatacttgctgatgatagagcgcacgcgccagtcgttgaggaaatcatcttcgccttcgcgcagatgcagggtgatttcggtgccgcgatcggctttggtgatatcagctacggtatattcgccttcgccggcggattcccagaacacgccgttttccggcttgtcgcccgccgcacgggtacgcacggtcactttgtccgccacgatgaaggccgaatagaagccaacgccgaactgaccgatcagctggctatccttcgcctggtcagaacccatcgattcgaggaacgctttggtgccggatttggcgatggtgccgagatggtcgataacctcttcccggttcataccgataccgttatcggcgatggtcagggtgcggttgtctttatcaaacgaaacccgcacgcgcagctcgccgtctccctcatacaaatccggctgcgacagcgcgcggaaacgcagcttatcggccgcatcagaggcgttggaaatcagctcacgcagaaagatttctttgttggaatagagggaatggatcatcaggtgcagaagctgctttacttctgactgaaaaccacgagtttcttgtcctttcatctgattcaacctcaacaatgccattttcaatgggtaaaaaaccgttgagtgggagatggggacagcggggaaatttttcaagcggaggcggcaaaggccgcctccatttgttcagaaagtaatcttgtggcgaccggccagggagtgggacagcgtggtgccgtcgaccatctccagctcgccgcccaccggcacgccgtgggcgattcggctggcgtcgacgccatactgcgcgcacagctccgcgatgtagttggccgtcgcctcgccctcaacggtcgggttggtggcgaggatcacctcggtgatcgactccgcctccagccgttgctccaggcgatcgagcccgatgtcatcaggcccgatgccgtcgagcggcgacaggtgccccatcagcacgaagtagcggccggaatactgcccggtctgctcaatggcatagatgtccgccggactctctaccacgcagatctggccgttttcctggcgacgcgggttgctgcagatattgcacacctcctgctcggtgaaggtgcggcaatcggcgcagtggccgatctccgacatcgcacgcgtcagcgcctgcgccaggcgcatcccaccgctgcgatcgcgctgcagcagggtaaacgccatgcgctgcgctgacttcgggccgacgcccggcagacagcgcagcgcttccataagctgagttaacagcgggctggtttgcatcagaacggcatcttgaagcctggcggcagttgcataccggcagaaacggaagccatcttctctttctgggtctcttcgatacggcgcgcggcgtcgttgaacgcggcagccaccagatcttcgagcatctctttgtcgtcttccagcaggcttgggtcgatctccacacggcggcagttgtgcgcgccgttaatggtcactttcaccagacccgcgccggattcgccggttacttccagctgagcgatctcttcctgcatcttctgcattttttcttgcatctgctgggcctgcttcatcaggttacccaggccgccttttccaccaaacataggcttctctctcagtcagtcatcgttaaaggtactgaatgccagtcagactggcattcaaatggggcgaatactctcttcatccagatcggcgtcgaagaaacgacgcagggtctgaatgttattatccgcgataatggcttcgcgcgcctgcgcgagcttctcttcataaatagcctgccgccactccagcggcgtacgcatcgcgggattatcgtcttccacgatggtcaattcaaccggcgtaccgtacaacacccccagcgcttcagccagcttttgctgcgcgctggcggaattgaggtggcgctggctgggacgcagatgcagacagacgcggctgccctcctgctctttccacgcgttgagcgccacctgctcgaccagcttcggtaccgccagctggctcacttccgccgcccagctgtcgcgctcgaccgcttcttcggcgagcttggccgccagctccggcgtcttctcatgctccagcgcctttttcagcgctttgggcgtggcgacttcgactttgctctcttccaccaccgtcgtcgccttccagcgataggcctctttcttcgccggggcctgctccagcgcggccgcggccggacgagcctggacgcgctcggtaatcgaactcagtcgctccagcgcagcgttattcaccggccgcgcgcgggaagcggctgccggttcactcttttttggggtggttgctccctggctgcgctgcaggtggctgcgggccgccagcacctggctggtggtcggcggcaaactctgcggcgactgtggcggcggcgcggcgggggcaaccggctgacgcggcgcgggcgcggcggcctgtgccggctgcacctccggctccggcagcggcttacgcggatgaaacgccagggcacgcagcagcgtcatttcgacgcccatccgccggtccggggcgtaaggcagctctttgcggccaatcagcagcgtttggtagtagagctgaacgtcgccgggcggtacggttcgcgccagttcgcgcatccgcacttcgaccgcggccatgtcggcgcccagcgccgaaggcgacagctgaaccatggcgatgcggtgcagcaggctctgcatctcgaccagcagcgcctcccactcgacgccgcgtgcggcggcgtcattgacgcccgccatgacccgctcgccgtcggcagcaaccagcgcttcaatcagcgacagcgcctgatcgtcatcaagggtgccgagcatggtgctcaccgatgcggccgtcagctgcccttccccactggcaatcgcctgatcggtcaggcttaaggcatcgcgcaggctgccatcggccgcccgcgacaacagctgcagcgcgcggggctcaaaggcaatctgctcttcgccaagaatatgctccagctgatggcggatctgttcaacgtccagcgccttcaggtggaactgcaggcagcgggataagatcgttaccggcagcttctgcggatccgttgtcgccagcaggaatttgacgtgcgccggcggctcctccagcgtttttaacaacgcgttgaagctgtgacgcgacagcatatggacttcgtcgatgagatagaccttaaagcggccgcgggccggcgcgtactggacgttgtccagcagatcgcgggtatcttcgactttggttcgcgaggcggcgtcaatctcaatcagatcgacaaagcgcccctgttcaatttcccggcagttatcgcacacgccgcagggggtggcggtgatgccggtttcacagtttaaccctttcgccagcagacgggcgatggaggtcttcccgaccccgcgggtaccggaaaaaagataagcgtgatgaatgcgccctaacgacaagccgttcgccagtgcggtcagcacatgttcctggccgacgacgtcagcaaaggtttgtgggcgccatttacgggctaagacctgataactcatgggctggctctgaaacgctggaaggtgaaatcacgaaggggccatgctatcacagccccgcccgatcggcgaggctatgtggagggatttgcttagtggcccgggaacggcaccagactgtagcagtggatccccagcttctccaggcgctgttcgccgcccagatcgaagagattgataatgaaagcggcatcgtgcacttcgccgccgaggcggcggatcagtttgaccgtggcgtcgatagtgccgccggtcgccagcagatcgtcaaccaccagcactttatcgcccggtttaatggcgtcaacgtggatctccagctgatcggtgccatactccagctcataggtctcggcaatggtttcacgcggcaacttacgcggcttgcgtaccggaacaaagcccacgcccagcgccagcgcaaccggggcgccgaacaggaagccacgcgcctcagtccctaccactttggtaatacccgcgtctttgtagcgctcggtcagcagttcaatgctaagcgcgtaggccttcgggtcttccagtaagctggtgacatcgcggaaaagaatgccaggttttggataatcctcgatactctggatgctgttcttcagatattcaagctgctgtgcagttgcggtcataagtgtatgcctgattgaaacggtattacccacgggcgtgcaaaaggggccaaagaaacatttgtttaacctttgaccaggcttgcccgcgctcgaaaacgccagaatttactggctgtcggcaacaattgcaacaggcattattgcgcatcagtgcttttgttgctttgcgtcaaccaccggaatgcgccacataaagatcagcagacaggccagaatgaccaacagcatgatgcgcacccacgtaagcttaaccagccatagcgaaatagcaaaagtcaccacgatcatcgcaatggcgcgcggtttagcgccgcgaggcatggcgcggtactgttgccagtggcgaagatagccgccaaaccaggagcgatacagcagccactggtgaaagcgcggcgatgagcgggcaaagcaccaggcggcgagcagaataaacggcgtcgtcggcagcaacggtaagaagacgcccagcgtacccagcgctaccgccagccagccgataatggttaaaataacaggtggcataatgcgaatcgttatcaaacagatgaggctactgtagcacagttggctgacggaaaatggagggggttggtgaaaactgctcaacttttacaaacgctgaacgaccagctgagtgagctggccgcgctggtggcgccgctggcggagcacgcgaccctcagcccgcgctttgaccgccagctcttccacacccgcagcacgctgatgcaggcctatctggcggaagcccaacacaactttaaccagctccgccaggccgtcgagcgccagcagctgccgcaggtggtctggattgccgagcgtctggcggcacaaatcgccgcgctgcgccgtgaaaccgccacctggtccttgcgcagttgggaccacgcgtcgccaacgttgagccgctggcagcgccgtcgcctgcagcatcaggagtatgagcgccgcctgctggcgatgcgcgaccaacgccagcgtcagctggcacaggcgaccagccttgacgagcagcagcggctggggaaagaagttgaagcctacagcggccggttggcgcgctgccgacaggcgctggacaagattgaaaacgtactggcgcggctgacgcgctaacaggagagcccgatgtcgctggaaaatgcatccgatgaggtcaaactggccgtcgatttaatcatgttgctggaatcgcatcagatcccggcgcaaaccgtgctgagcgcgctggaaattgtccggcgggattatgcaaacaagttaaaaaacgcggaaagcgggtcgcaaaacccagagaagtaggatgttgtctccggcagtgtgctggcagtctggtcctctgcgcatgacgccactggagacaatattgatggaaaaagtcagtcaaaccccacacgacgcggtgtttcgccagatgctcatgcatcaggcggtcgcgaaggattttttgcagttgtacctccccgcgccgtttctggcgatctgcgaactggattcgctgcagctggtctccggtagctttgttgaagaggacctgcgcgccagctattccgatatcctttactcactgcgcacgcgtcatggaccgggctatgtgtacgcgctgattgagcaccagagtaccccggacaagctgatggcgtttcgcctgctgcgctatgcgctggccgccatgcagcgtcatctggacgccggccacgacacgctgccgctggtggtgccgattctgttttatcacggcaaagtgagcccctggccctgggcccgcaactggcaacagctattcgccgatccggcgctggcgaaggcgctctatagcaatgattttccgctggtggacctcaccgtaatgccagataatcagatcgcccgtcatcggcggatggccatgctggagctgctgcaaaagcatatccgccatcgcgatctggccgagctgcaggtgccgctgattgcgctgatgacgcaaggctatctgacagaagcgcagttgaatacgctgctgcgctatatgttgcaggcgggaactacggaacatccgggggcgctgatccgcacgctggcggcgcagtcgcccaggcataaggagctgatgatgaccattgccgaatggctggaagagaaaggccgtaaacagggacagcaagagggtgagcaggaagctacccgcagcatcgccgccagaatgctggcgcgcggcctcgaacgtcaaaccgtgcaggagctcaccgggctgagcgatgaagaactcgccgcgctggcgccctgatacagcaggggcggctttgcgccgcccctcttcgctcaggacgcggtggtgggcgccagatcgtcgcctttcccgtcccgtttcacttcggtgacttcatcgcctttttcattgcgcagatgaacttccagctggttaaaggcaatgttgatgtcattctcccggcacaggcggtcgatggcgcggttgagctcatccaccgtgtagctgcgatcgcgcagttctcgaacatacagacgcagttcatgatccagggtactggccccgaaggtggtgaagaaaaccgctggcgccggctcctgcatcactttcggatgatcgtgcgcggccttcagcagcacctctttcaccttatccaggtctgagccataggcgacgccgaggcggatcaccacccgggtcacggtgtcggagagcgaccagttgatcaagcgctcggtaacgaacgccttgttcgggataatcacctctttgcgatcgaaatcggtgatggtggtggcgcgaatacggattttgcttaccgtccccgagaaggttccgatagtgaccgtatccccaatgcgcaccggacgttcgaacagaatgattaggccggagacaaagttaccgaagatctcctgcagaccaaaacctaaaccaaccgacagcgcggccgccagccattgcagtttatcccaggagacgcccagcgccccgaataccgtcatcgccccgatagcgataatcgcatagttgagaatggtggtgatggcgtaggaggtcccctgacgcatgttgagccgcgacagcaccagcacctccagcaaacccggcaggttgcggatcagcgcccaggcgaccattgacgccacaatggcgaacaacaaactgcccatcgtcacgctgcgcaccacgctggcccccgcctcggtgccgttgtagtgccagagggtaatgctgtcgaggtaggcgaaaacggtgatcaaatcagaccaaatcgcccagaacatcaccgcgaacagcgcgaccatcaccaacatggtgatgcgcagcgtctgctggttgacctgctcgagagcgatagttggctcttcctgcggctcggcgccttccgccccttccttcaccagatgttgacggcgcgccagcgcgcggcgccaggcgatacgccgcgccgccacgctcaggccgcgcagcacggtctggtacagcaggttccagatcatcaccagatacacggtctcgatccagcgtcccgccagacgcagcgtcgtgtagaagtagccggttgccgtcagcaccatcagggccaccggaacgatagacaacaccgtgatcgtcagcaggcgcaggctgtgcgactctttatcgcgccagctttcccggcacatcggccaaaccagcaccgcgatcagcagtaagttgaagaaaatcaccaactgccccagcacgtcgtccatcaggttcagcggcgacagttcggaaatcaccgaccagaaattcagcggcagcagcgccaggctgacgcgaacgatctgccgccgccagtggctggtcaactgcgccggcatattaaagtggttgaccgcgacgccgttcttttccagcactttccagcacaggccaaacaccagccagaacatagccagctttttactgtacgcccacagcagtccgctaatatttaactgcatggtgagtaagatcagaccgatagccagaatcaacagcaccaccggtaaggcgcggatcagatcgatcaggatcgccttcggcgtatgcaactgggtatcgttgcgcagctgtcccacctgggaagcaagctttgcctgataatccttgagccactgcagacgccagcggatgaggccggcaatcaacagcagcggtaaaccggccaggaaagcgacaaacaccgcaggccacgctttttcccagttcacggtgattttcatcgccttaaactgacctttcagcgcctccgggaaggccttaatccactcccagtccatcggtttattgctgttcacccagaaaatttgctgggtcagaatttccttcagactgctcgagacgctcatcagctgctgctggttgatctgcaggttgatggccatcatcagctggttgcccaactgtttgttgaactgatcaagcagttctcgacgcatgtcgatcacttccagtagcgcggcgtggacttcatcgttcacttcgctgctgtgcccctcctccagtttggcgacaaaggcatcgctctggaacagcgcgtcgcgctgctggttcacctcaaactgttcaagccgcaggtcggcgatgcggttggtcatatcctgcagctcatccgccgacggtaatgtctgttgctgttggtaaagaatacgcgacagcagcaggctcccccgcagaactgaaatttgctctttaatatcccgttcagactgcagcgcgcggtcgagccagtttttgacctggatattgcgctgcaccagctggttaccgttctctgttgcctggatcagcttctcgctgagctgatggttaatatccagctcctgcttgaccagcgggttggcctgaatacgcgccgtttcgtcgggggtaaccgcctcctgggcggttttctcggtcagggtcagccgtttgctgttcacggcctcctgcagcagctgtagctgatgctccagccggttgctccaggcggtgacatagtcacgctgcttctgtagggtatcctgcaggatagtgttgccttcgaggctcttgcgctgttgctcgatctgcgcgttgagcaatgcctgttgagcctgcaacagcacctgctgggtcgggcgtagggtctcgtcgcccaccgaggtgccattcagacgattgcggatctgctgcagctgctgggaggcgttgaacatcgcattttgcacgcgttccggctgcgtttgcagggaaaccagctggctgttataggtcgccagatcgttttgcgcattctgcagatcgtccagcgtctgggtgacgcgcgactccagctgacgcagggagagcgtacttagcgttttgcgcgtcgcgtcgtcgttcgggacatcgctcaggttattgaggctctccaccgcctggcgcagcttcgccggcgcctgctcgacctgctgtcgcagctgtgccgtctcgcttttgatacgctcgattttatccagcgtttccagcgtctgagtcagatcctgctggaccagtttgtcctgcggagtcagttctttttgcttgtttaacgtattgagctggctctgcacctctgcccgatcggggagatcagcggcgcggccctggactgggctgaaaaggccgataaaacagagcagcgtgataataaagatgaacgtggcgcgttgcctggagatcgtgtgcagcatagttaatatgaatgaatgcaaatgccggagaataccgggggtcgtcgcaagcgcgcagaatagcacttctcagcgctggcgaatagcggcggacggcgctaaaaattcacgcccatccgcgcgctacctttaagctgacaagctctccgggccgcgtagcgtcgggcagaattgatacatctccagcagaatagcgacgtagtcccgcgcttccgcatgcaggtcgaacgaatcgggggcaaacagccagttttccatcagtccggaaaggtagctgcgcattaacacggccgcccgccgggtgagtaaattggcgggcagcagcttcgccgcgatgcactctttcaaggtctgctcgatacgctcataactcgccagggagagctgccgctgggcctgttgcaccacggtcatttcaccgacgaactcacacttatgatagataatctccatcattaatcgtcgacgttcttctgtcactgtcgcttcaagaacatagactagaatctccctgataactgagagtggatcgttggggaattttgcccgatactcaatttcgagatcgctaatactggcgtctgacagctcccaaatttcgttgaataaatctgatttattcttgaaatgccagtagatagcccccctcgttacacccgcagcttttgcaattgttgccaacgaggtagatgatacgccttgctgcgaaaacagacgcagagcaacatccagaatcagttgccgggtttcacgtgcctgttgtttggtttttcgtgccataggttaatgactttacagaggttacgtttacatacatttgtgaatgtatgtaccatagcatgaccataatagaaagactgtagtgggtttgtggttgtttgagccactgaacattttgaaattggacactcgaggtttacatatgaacaaaaacagagggttaacgcctctggcggtcgttctgatgctctcaggcagcttagcgctaacaggatgtgacgataaaccggctcaacagggagcccagcacatgccggaagtcggtattgtgacgctcaaatccgcacctctacaaataaccaccgaactgccaggccgcaccagcgcctatcgcattgcggaagtccgtcctcaggtcagtggcattattttaaaacgtaacttcgtggaaggtagcgatatccaggccggcgtctccctgtatcagatcgatccagccacctatcaggccagctatgacagcgccaaaggcgacctggcaaaagcccaggcggcggcaaacatggatcaactgacggtcaagcgttatcagaaactgttgggcaccaaatatattagtcaacaagactacgataccgccgttgcgacggcgcagcagagcaatgcggccgtggtcgcggcgaaagcggccgttgaaaccgcgcgcatcaatctggcctacaccaaagtcacctcgccgatcagcggccggattggtaaatccgccgtgaccgaaggggcgctggtacagaatggtcaaacgaccgccctggcaaccgttcagcagctggatccgatctatgttgacgtcacccagtcgagcaatgatttcctgcgcctgaagcaggagctagccgacggccgcctgaaacaggaaaacggcaaagcgaaagtggagctggtgactaatgacggtcttaagtatccgcagtccggcacgctggaattctcggatgtcaccgtcgatcagaccaccggctcaatcacgctacgcgctattttcccgaacccggatcacaccctgcttccggggatgttcgtccgtgcccgtctggaagaagggattaaccctgacgccctgctggtaccgcaacagggtgttacccgtacgccgcgcggcgacgccagcgtcatggtagtgggggaaggcgataaagtcgaagtccgccaggtcactgcttctcaggcgatcggcgataaatggctggtcactgacggtctgaaatccggcgatcgcgttatcgtcaccggcctgcaaaaaatcaaaccaggtgtgcaggtaaaagcgcaggaagtagcttctgatgataaacagcaagccgcaggcaacgcgccatcagaacaaaccaagtcttaacttaaacaggagccgttaagacatgcctaatttctttatcgatcgccccatatttgcatgggtgatcgccattatcatcatgctggctgggggattatcgatcctcaaattgccggtggcgcaatatccgacgattgcgccgccagcaatttccattaccgccatgtaccccggtgctgacgccgaaacggtgcagaacaccgtaactcaggttatcgaacagaatatgaacggtatcgatcacctgatgtacatgtcctcaaatggcgactccaccggtacggcaaccattacgctgaccttcgaatccggtaccgatccggatatcgcccaggttcaggttcagaacaagctggcgctggcgacgcctctgctgccgcaagaagtacagcagcaagggattagcgttgagaaagcgtccagcagcttcctgatggttgtcggcgtcattaacaccaacggcaccatgaaccaggacgatatttcggactacgtggcggccaacatgaaggatccgattagccgtaccagcggcgtcggcgacgttcagctattcggttcccagtatgcgatgcgtatctggatggatccaaacaaactgaacaacttccagcttacgccggtggatgtgatcagcgccctgaaagcgcagaacgcccaggtggccgcgggccagttaggcggtacgccgccggtgaaaggccagcagcttaacgcctcgatcatcgcgcagacgcgtctgaccaatacggaagagtttggcaacatcctgctgaaggtgaaccaggacggttcccaggttcgtctgcgtgatgtcgccaaaattgagctgggcggcgaaagctatgacgtggtggcgaagtttaacggccagccggcatccggtctgggtattaaactggctaccggcgcgaacgcgctggataccgccaacgctattcgcgctgaactggcgaagatggagccgtttttcccgtcggggatgaagatcgtttacccgtatgacaccaccccgttcgtgaaaatttctattcacgaagtggttaaaacgctggtggaagcgatcatcctggtgttcctggtcatgtatctgttcctgcagaacttccgcgccaccctgatccccaccatcgcggtaccggtggtcctgttaggcaccttcgcggtgctggcggcgtttggcttctcgataaacaccctgacgatgttcgggatggtgctcgccatcggcctgttggtggatgacgccatcgtggtggtagagaacgtcgagcgcgtgatggcggaagagggtctgccgccgaaagaagcgacgcgtaaatcgatgggacagattcagggcgcgctggttggtatcgcgatggtgctgtcggcggtatttatcccgatggcgttcttcggcggctcaaccggggccatctatcgccagttctccatcactatcgtttccgcgatggcgctgtcggtactggtggcgttaatcctgacgccggcgctgtgcgccacgatgctgaaacccattcagaaaggcagccatggcgcgaccaccggcttcttcggctggtttaaccgcatgtttgataagagcacgcaccattacaccgacagcgtaggcaacattctgcgcagcaccggtcgttatctggtgctgtatctgatcatcgtggtgggtatggcatggctgtttgtccgcctgccgagctcgttcctgccggacgaggaccagggtgtattcctgagtatggcgcagctgcctgccggcgccacccaggagcgtacgcagaaagtgctggatgagatgacgaattactatctcaccaaagagaaggacaacgtggaatccgtgtttgcggttaacggcttcggtttcgccggccgcggccagaacaccggtatcgcgttcgtttcgctgaaagactggagccagcgtccgggtgaggaaaacaaagttgaagcgatcaccgcgagagcaatgggctacttctcgcagattaaagatgcgatggtcttcgcctttaacctgccggctatcgttgaactgggtaccgcgaccggctttgacttcgagctgattgaccagggcggtctgggccacgaaaaactgacccaggcgcgtaaccaactgtttggcatggtggcgcagcatcctgacgtgctgaccggcgtgcgccctaacggtctggaagatacaccgcagtttaaaatcgatatcgatcaggagaaagctcaggcgctgggcgtctccatcagcgacattaacaccacgctgggcgcagcctggggcggaagctatgtcaacgactttatcgaccgcggccgcgtgaagaaagtgtacatcatgtccgaagcgaaataccgtatgctgccggaagatatcggcaagtggtatgttcgcggcagcgatggtcagatggtgccgttctctgctttctcgacctcgcgttgggaatacggttcgccgcgtctggaacgctacaacggtctgccgtcactggaaatcctcggtcaggccgcgccaggcaagagtaccggtgaggcgatggcgctgatggaagagctggcgggtaaactgccttccggtatcggctacgactggaccgggatgtcttatcaggagcgactgtccggcaaccaggcccctgccctgtatgccatctcgctgattgtcgtcttcctgtgtctggcggcgctgtatgagagctggtcgattccgttctcggttatgctggtcgtccccttgggtgtggttggtgcgctgttagccgccaccttccgcgggctaaccaacgacgtttacttccaggtgggtctgctgaccaccatcggcctgtcggcgaagaacgcaatattgatcgttgaattcgccaaagacctgatggagaaagagggcaaagggctgattgaggcgacgcttgaagcagtacgtatgcgtctacgtccaatcctgatgacatctctggcgttcatcctcggggtaatgccgctagttatcagctccggcgccggctccggtgcgcagaacgccgtcggtacaggcgtaatgggcgggatggtgaccgcgacgatcctggcgatcttcttcgtgccggtgttctttgtggtggttcgtcgccgctttagcaaaaaatcggaagatatagagcacagccatcaggttgagcatcattaatcttcactcctgaacaaagggccgctaccgcggcccttttttatcactggctggcaaggcacatattgccattgtttatttttcgttctgcatttaatatatattgatatggcgcaggctatttttagcagcttgttcaacaactcgggatcggcaaacactcatttaccaggaataatcttactatcattatccacgggtcggcggtttctgaacgcgacagctgcctgccttaaaccaatgattcataagatttctctatttctccggctgtgggccagcgcctgcgaaattaattcgtctatttttaagataatttctcgctgataattgtaatttttcgtaatagcacgatgaaatctgttggagagtggattatagttaaatcagcaggattactcagttagtgtcaggtcagttagtcgtgttcatcccacaacggtgtttgctagtcgtcgtttaaaccactcaaaaggggatgcgttatggacgaatactcgccaaaaagacatgatattgcacagctacgctttctctgcgaaacgctgtatcatgactgccttgcaaacctggaagagagcaaccatggctgggtcaacgacccgacgtcggctgtcaatctccagttaaatgaattgatcgagcacattgccacattcgctcttaattataaaattaagtatgcagaggataataagctgatcgctcaggttgacgaatatctggacgacacttttacgttgttcagtaactacggcattaactctacggatttgcaaaagtggaaaaaatccggtaaccgactatttcgttgctttgtcaacgccagccgggaaaacccggccagtctatcgtgttagaattattacaatcaaaaggtggaattatgtctgataagccattaactaaaacagactatttgatgcgcttacgtcgttgccagacaattgacacgctggagcgcgtcattgaaaaaaataaatatgaactgtctgataatgagctggcggtattttactcagctgccgaccatcgtctggcggaactgaccatgaataagctatacgataaaatcccgacttctgtctggaaatttatccgctaatttacgcgtattacgtggtctgctggccggacggtacgggtcagccgccatagggtatctttgtgatagacatcacatcattcagccaacagcaaccctgtaaccggtttcttttttatactgctacggccatcaacagtcaggtataaggaagacccatgagtgaagaaaaacgcaaaatgatcgccggtgagctctatttatctggcgacccaacgcttcgcgccgatcgcctgcgcgccagacagttgttgcaccgttataatcattccgccccggatgaccaggaacaacgtcagcatattctggccgagctgttcgctcgcgccggcgatgcgtatatcgagccaagctttcgctgcgactatggttataatatttttctcggcgccggtttttacgccaattttgactgcgtgatgctcgacgtctgccctatccatattggcgataactgtatgctggcgccaggcgtccatatttataccgccactcatccgctggacgccgatgcgcgtaatagcggccaggaatacggcaagccggtaactattggccacaatgtgtggattgggggtcgggcagtgatcaatcccggcgtgaccattggcgataatgcggtcattgcgtccggcgcggtagtcaccaaagacgtacctgcctgtaccgtcgtcggcggtaacccggcgcagatcattaagcgccttccgccgacaaatccgtaactgttatgcttttctgtaactgatctgttactttctccgcagaatattgcaacataaaatagccctcaggctgagcctgccgcgcctggtccgccgggcgcggcaggctcattgcagaattcgaggaccaagatgacagaaatacaacgcctgctgattcacaccattgacgaactcaacgtccaggaaaaacgcgataatcgcccgcgttttagcatcagttttatccgcaaccatccgggactgtttgttgccatgtatgccgcgtttctggcgacgctggtggtcatgctgcgctctgaaacgctggtagactcggtctggttgctggtggtgctgttcattctgttcaacgcctttttcttctttgacgtctatccacgctatcgctacgaggatatcgatgtcctcgactttcgcgtgtgctacaacggggaatggtacaacacccgctttgtcccccggcagctgatcgaccgtatcctgcagtcgccagacgtcgatagcgagcagaaggcgcagctcaaaaagatggtcgccaccaaaggcgagctctccttctacgacgtctttaccctcacgcgcgccggtgctgcgcaataaggcgatttagggtccgcagcgccgggagatagcgagaagcagaggtattgccatacccaagcaccagtccgctccgcgctcgctgcgggtcgagatagaaatgacttaacgcggcgggcgccagctgaaactggcgcgcctgctgcgcaagcgtccggtcattaacgccctccatcgccaccgtcaggtgcatcccccctcccccgccgagaacgtcgcacggcacggttatctcttgcgccagcgcctcgcgcagctgttgctgacgtttacggtacaggcggcgcatcgctgccagatggcgcgcatagtgtcccttctcgataaagctggccagcgcccgctgttcagcacggtgtcccccgcgcagcagcgcgccaatggcgtcctgagcagcatccgccagcgcgggcggcataaccataaaaccgatacgcaacgccggaaacagcgttttgctgaaggtgccgagatagaccaccggggcatcaggcaccattcccagcatcgccgggatcggttctccgctatggcgaaactcgctgtcgtagtcatcctccacaatccacgccccgtgccggcgggcatattccacgagcgccagacggcgcccggcgctcatgatgctcccacagggatactggtgtgaaggagaggtgaaaatgagccggggcggctccgcgacgccgttggcaatacacatcccttcatcgtcgacagccattcctctgacccgcagtcccgcccgctgaaagccactcctcgcccccaggtaccccggttcttccagccacacgctgtcgcccgggttggtcagtagcgaggcgcataagttgacgccttccagcgcgccttcggtgatgacgatctgccggatatcgcaccggatgccccgggagagcgccagatgacgagcgatagcctctcgcagcaaaggatcgcccgcggcttcgccataacccagcagcgcgctaccatcttcgcgtagcacgttatccatcagtcgccgccacagcggcagcgggaaatagtttaccgccggcatgcctggcgtaaatgccagcgtcggtgagtcgcggcgcatcgcggctggcagcctttgcagccgctcaggcagcacgacgggcggcatctgacccgcctcctggcggcaggaggcgagtggtgccacctgcgttccctgacggctccgtgtcaggtacccctccagcgccagctgttccagtgcggcattgaccgtattccgcgacaggtgtagccgttcggccatcacccgcgatccgggaaaacggcagcgggccgtcagggttccctgcaggatagcgtcacgtaaggtgtggtaaagggcgcgctgtaaggtttcgaccgtgcggttccgcatcccctgcgtcaacagcgtaaaaaacccctcgtccggtatattcatattgcctcctcgtggccccataaaaacatactctaatggcactttttatggaaccagcgagcgcgtacgctgcctgtaaatccccaataaggaaaccgcaatgtgcgaatataatcagtttggccaggcgctcggcgtcgcgctgcctgactggcagccgcgcccctggccgacacgacaggtattacagggcagccgttgtcgactcgaaccgctgactcttgctcatgccagcgatctgttcgccgctcaccagctggcgccagacgcccgcagctggacgtggctgctgcgtgaacctgagagcaaccttgcagaattcagtgcctgggtggagcaggtcgccacgctggcagacccgattcattttgccgtcgttgaccagcagcgagggaaagcggtcggctcgctggcgttaatgcgtatcgatatcgctcacggtgtggtagaggtggggcatgtgcatttttcaccgttactgagccgaacggccatggccaccgaagcgcactggctgttgatgcagtatgtctttgatacgctcggctaccgtcgctatgaatggaaatgcaacagtcttaatatcccatcagcccgggcggcaaggcggctggggtttcagtacgaaggacgttttcgccaggcgctggtgagtaaaggacacaaccgggacacggactggttttcggtgatagacggcgaatggccggagctggataacgccatgcgccaatggctggccgccgacaattttaccgccgacggccaacagcgccgctcgctggagagtttccgttaacggcgttttttgcgcccctgcaccgctttgaagcgggggttgctcttacagataacgtacagccgccctttgcgtttaaccagctggcaatccgggtggcgctgtttagcgctacgtaatgagttgacgacctgcatcatgctttccttttcgcatcaataaagccgccgaagcgctggcggaatcgggctgcactgccttcattggcgaaggttttttgtttgcccgtgtagtacggatgcgatttcgaggagacgtcgatcgtcacatacggaaaagtttcgccatcgagttcaatcacgcgatcggtgcggatagttgagccgactttaaaatactcattcgcgctggtgtcgtgaaacaccaccgtacgatagggaggatggatatgggctttcatgctgacctctttgttacgttataacataacaataaggttacgccgtgctgtgacaaagatcaacccttctcaatttaagggtaaggtgataaggcgagtttccccgcctttggcgtcagggtgccagacggtgggcgatggcgcggagctgttccgcaatggcctgcagatcttttccctgctcgattcgggcgccgctggaatggcgtatcaccaggcgcgccggcagaatggatgaggtatgaggcgccccgctggtgctggcgaggatccgccgcaccgcctctttcccctgcaggtcgaggtcgagcgacacggtactcagcgccggatagaaaaaggagctttcgtaagtatcgtcatagccaataaccgacttctcccccggcaccgccacctgatgctgatggaaggcgctgagcacccccagcgccatctgatcattacccaccagcacagcgctgaaattaggcgtttcgcgcagcatctgcagcgcgccggcgtagccgctctgcgcatcccagttgccgtgcaggacggtcaccggcttcagaccgtaaccatccagggtctccagccagctttttaaccggagtttggccgagactgagctgtccggccccgccagcagggcgatctcccgatgccccatctcatagagatatttgacgctggcccgggtgccgtccgccgggttaaacgaaacgttaaacacggaactgtagggatcaacgtcgagaaacaggcagacgatatcatcgttgtcagcagcgattttctgcgcctgttcggtctccagcggcacgttgataatgactttatccacccgctgagatttcagctcattgatggaatcctggatgctttggttgacgctctcatcgatcatcgaaatcagaacctggtaaccttccaggttggcatagcgttttaccgccgccgccacctgggaaggcgcatgccaggccagagaaatagtcaccagcccgaccgtctggctctccttccccaccagctgctgcgccagccggtttggcacatagcgtaaggcctctatcgatttctccaccttgcgacgcgtcgcttcggatacattagctgatttgttgagtaccctggacacggtctggtaagagacgcccgcatggcgtgcgacgtcttccagagtagcgcttttagacttcatggtccggttccttatgttgttatcccatgattgtaacaggggccatttgaaaaaacgctcaccgccacctctcactgcaaaacaatagcgataaaagtattacgttcacaatacaacgaattgtgaatcatctcacccatcacaacaaaaaccaccgtgattatttgcagttaatcacacaataatcatatctcatttgcctgaagttacatttaggcattttatgacaccagttatgtgaacgtaatacaaaacaataagaggatagagatgaacactacactgcgcgccctttcagtcgcgttagccgctgcgctaatcgctccttccgcgtttgcggccaccgccgcgatcccaacgatcgatttccatggctatatgcgcgccggggttggggtctccggcgacggtagcgaagcggaatggcaaaaaaataagctgggccgtttggggaacgagtcggatacctacggcgagctggagctgggctctgaggtctataagaaagatgacgtcagcttctatctcgacagtatggtcagcatggtctccgacggctctaacgataatgaaaccacgctgaacgatgatgcacagttcggcttacgtcagttgaacctgcagataaaggggctgatccctggcgatccgaatgcggtgatctggggcggtaaacgttactaccagcgccatgatctgcatatcatcgataccaaatactggaacatttccggctccggagccggggtggaaaactacaccctcggcccgggcgccgtctcgctggcctggatccgcggcgatgccaacgatgttgactatcgcgtcgatggcgacagcaacgtcaatatcaactatatcgatttacgctacgcgggctggaagccatgggcgggctcgtggaccgaattcggtatcgactacgcgatgccaaacaccaccaaaaaacaggatagctacggcggactgtacgatgctgacaacggcgtcatgctgaccggtgaaatcagtcaggatatgctgggcggctataacaaaaccgtgctgcagtacgccaacaaaggcctggcgcagaacatggtctcccagggcggcggctggtacgatatgtggaactacgtgaacgacgccaccggttatcgcgtgattaacaccggcctgatcccgattactgagaagttttctatcaaccacgttctgacctggggctcggcggatgacattaccgactataccgacaaaacgcggatgctgtcgctggtcgcccgcgggcagtaccagttcaccgactacgtgcgcctgattggcgaagtcggcggtttctatcagaaagacagctacaacaatggcaccagctacaaacaggccggtgagaaatacaccattgcgttgggcctggcggacgggccagactttatgtcacgtccggaattacgcatttttgcttcatatttgaatgattccgaagatggtaaaccgtttgaagaccagacggcgaataatacctggaatttcggcgtgcaggttgaggcctggtggtaatcgcgcacggctaagactcatacgttatttttatctcctgctgtaagactgttaattatcttccggtaaactttattgccactgctgtctttgtcttattttcgggataacctgctttcaggttatcccgttttatttatttccgggcggcaaaatgttcatccagaagctgacgcagcgcatcggactgtttaccgaaaatagcatgcacctgctgaccaagaataataacccctagcgcgccctgctgctgtaatgcttcggagtccacggccgcaagatggcgaacgctaacccgcagacgggtaatacaggcgtccacttgcgtaatattcgcttcgccaccaaaggcctgaatcagcgcctcgatttgctgtttttccgcctcgcttaatggctgtgccggacgcgctggggagaaatagtgcaggaaggattttaaactcaccataataaactccaggtttaagataaaaaaaagcctgctcgtcagagcaggcgtggagaagaagaaattacgcgtgacgacggagaatacggcaatcccatgccgacagggtcagtggagccgataccgccgcgtcggtcaggcaatcccgatacccttgcggcagggtcagggtatggttttgcgcgctgtagttctgcaggaagataaatgcgttgtcaccgtcggtgcgcgcagtcgccaccacgccgggtggtaactccgtcgctatcgcccgcggcagggccagctccttgctcagggcggtaaagaaatcgcgctggaaggctaaatcgttgcgggaggccacatgccaggctttgcctttcccgaacgcgttcaccgtcacagccggccgtccggcataaaaatcatcccggtaggtggccagcgcctgggcgctctcgatatggatcagttcgcagagatggcgcacctgataagggccctgcagaccgcactgattcccggcaagcccctgcaccagattaaactcgccgtcattcaggcagtcgatctcttccgcccagatccccagcagattgcgcagcgggcccgggaagccgccgagatagcagagatcggactcattgacgataccggtccagtaggtggtcaccaggtggccgccgttggcgacaaacgcctccgcccgaccggcaaagccgtcgcgcaccatatataacatcggggcaatcactaactgatacggcgttaaatcgacatcggcgtcaatcacatcgacggcgatgccctgctcccagaacgggcggtagtgctcgttgaccgtcttctcatattccatcccaagattgcgcggcccctgggcgtcatccagcgcccagcggttctgctggtcgaagataatcgctactttcgcctcggtgcgacagcccctcacctccggcagcttgctgaggatctcgccgagctggcagacttcgcggccaatgcgggtatcaatatgtccgacgtggtcgaccactgcgccgtgaaatttctcaaccgaaccgcggcttttccgccactggaaatactgcaccgagtcggcgccatgcgccaccgcctgcagcgaggaaagaatatgcattcccggcttcttcagtttgctggtcggctgccagttggtggcgcccggggtggactccatcagcacaaacggtttgccgcccttcaggctgcgcatcatgtcgtgatacatcgcggtgtaacaggccagcgcggtttcgtctttatcgcggtgccacatcggatagctgtcccaggagatgaaatccagcgcctccgccagccgccagtagtcgtaatcgtagaaatactccataaagttggtagtcaccggcagggaggcattcgccgccttcagcggagcaatttcatggcggcagaaatcggtcacctgagcggtgttaaagcgatgccagtcaagattaagaccgtggatcgacatctcgccctgcggcgcaggcgattcaatctgcgaccagtcggtataggtatgactccagaaggtgctccaccaggcctggttgaggttctccagggtctggtaacgcgccttcagccagtcgcgaaaacggttctggcagagatcgcaatggcattcaccgccatattcgttggaaatatgccagcccagcaccgccgggtgtgaggaataacgttctgccagcagggtattgatttgcagggttttctcgcgatagaccggtgacgacatacagtggttgtgacggccgccgtgcagggccggcacccgatcgcgccccacccgcagaacctgcggatagcgctgcgacatccacgccggacgcgcgccgctcggcgtggccagaaagacatgaatgccggcggcatacagtttatcgaggataatatccagccaggcgaaattaaataccccttcgcgtggctccagtttcgcccagctaaatattcccaccgacatcacattgcattttgcctgctgcatcatggcaatgtctttatcaataatatcggggtcattctcccattgctccggattataatccgcgccatgcagcagcgtactaaccttcggatgtaaaggtgcaaatttattcataataaacttcctgaaaaagacgacaaaaaaattaattaaaaacttttaccgacggcaatacttttccctggcaatcaaatagcgcctgattttcacgtgcattaccctctttccactcgtcgtggatatatttcatccccgccggggtggcccaggtatttcccggcacggcaatccatgtaggctcccaatagaaaatacctttgccacgctggtctggcacatcaaccaccgcctgcattaaatcgtgaatatagttatattgcccctgtacgctggcgggatatcccccatccttttcctcttttgcctggaaactattttccgcgttatcgcagttggccagggtataggcataggccgcctcgacgacgatgacgtctttgttatagcgtttgctgatgtcatccatattggccttcagggcgctgatcgggccattccagtaggtgtacatcgacagaccaatcacgtcatacggtacatggcgcttgtcgatctcatcaaaccaccagcggaaggtatcgttcttggtcccttcggccagatgcagcatgattttcacctgctcgccctggcgcaggttctccttcaggccagcgatagccgcgttcagcaggccagccagccggtcgaactctccgccgccctgcccccagcttttcccttccggccacaggatgccgccgttgatttcgttgccgatctgcaccatatccggcagcacgcccgcctgcttaaagcgggcgatggtatcgcgggtatagtcatgaatcgccgttttcagctgcgggtaatccagcttttcccaggctttcggcttgaactgcttgccgggatcggtccagaaatcgctgtagtgaaaatcaagcagcagcttcatcccctgggctttcgcccgtttcgccagcgccagggtggtggccagatcattgttcccaccgccatagtcctcgccgctcgccgattgcggatccacccacagacggaggcggacatagttgacgccgttctctttcagaatagcgatcggatccttgcgctgattattctgatcgtagaacgtcgccccgtgcttttcggcgtccagcagcgtggagatatccgcgcctttgataaagtccgccggcatgccctgaaacgcgcgggttgcaagcgcgtccgcggccagagaagaggtggagaaactgcatgccagacaaaccgcaagccatgcgggtgtgaatcttttcatgtgcttatcctttagtactgcccgaggtcaggccggagacgaagtatttttgtagcgccaggtagaggatcgccaccggtacggcgatcagcaccgcccccgcagcgtaggtggtgtagctggcacccattttttgcgccaccaggttatacagaccgataggcagcgtgtatttatccggggtgcgcaggatggtgctggagaggatgaaatcccccagcggcccagtgaacgagaacagcgccaccaccgcgaggatgggcctcgacaacggcatgatgatctcgataaagatgcgaaagctgctggcgccgtccatgcgagcggactcatccaggtctttagggatcgcgtcgagataccccttcatcagccaggtattcatcgggatcatccccccgacgtagatcagcaccagcgccaggtggctgtttatcaggccaagcagttgcgacagcacaaagatggcaatcagcgcggaaaactgcgggatcatctgcagcagcaggaacagcatcagcccgttctgccgccctttaaagcggaagcgggagaaggcgtaagcggtaaagctaacgctaatcagagtcagcaccatggtcaggaagctgattttcatcgagttccagtaccaggtgaggtaattcacattgccattgaacagatcggcatagtgctggaacgacaggttttccggaatgatagaggtactgagcaggctattgccggcgttcagcgacgccccgaccgtccagaccagcggatagataatcaccaccgagaccaggatgaccaccagccaggtgagagagagtcggatccacttttcgcgtttaatactgggtgattgagccatgttgcttcccttacgccatgtcgtcatttttgaaggatttggtggcgcggaactgccacagcgccaggccgacgacaaagatcgacagcaggatcgtgatggtcgccgcgatggcgtactgcgacgaagacatcgtcagcttatagatccacgacaccagaatatccgtcccgccggcgttagagcctgccaccgcagggccgccgttgttgaacaggtaaatgatattgaagttattaaagttgaaggtgtactgggtgatgatgatcggcgcgatcgcatacagcaccagcggcagggtgatggtgcgcagacgggtaaaggcgctggcgccgtccatcgtcgccgcttcatacagatcgtccgggatcgcctgcaacacgccggtggtcatggcaaagacaaacgggaagccaagccaggtctgcatcatgatcagcgccgttttggtccagaacggatcggtgagccatgccttcggactgatgccaaaaaaggacaggatcgcgttgttgatgaccccgaaggagtcgttgaacataccggcaaaaacgagaatggtgacaaaccccggcaccgcccacggcaaaataaagatggtgcggatcagcggcttaaagcgcagatctttttggttcaccagaatcgccaacaacacgcccaccgtacactgcagggtggtcgccagcagcgtccacaccacggtccactgcagcacatccaggaaagtggagcgccagatggagagggtgaaaatattaataaagtttttcagccccacccagtccaccagtttcgccggcggggtgtggtacaggttgtagttggtgaaggcgatggcgaaaccgaacagaatcggaaagatcaccacaaacaccagcagaataaagcccggggtgatcatcaggtacggaaagccgtcgctcagcagcatctggtactgcttacgcacgctgttgagggcgatcccctcatcgcgttttttgccgttgagccacgcatcccgcagcgagagaaaatagatcagcacgccgaaagcgacgatcagcacgctgataatcccctcggctaacaggaagatagagttatcccgcggtacctcttcacccagggtatataacccccacaacccctcacgcaggaaatcataaaaaatccccagaaagctgctcagcagcaccaggaagaccagccctttcagccactggcgatgataaaactgaccgaaacccggcacgattgccagcagcaggccgcaccatgcatggcgcccgggcccgcgtgcgtcgctaaaattttcgctggaatggatgctcacactcgactccttctacaaacgggaggtccccctcccgctcggtgacttcacgtgacggtgaattactgattgctggcctgcattgcttcgatctgcatcgtgatctgtttcaccgcgttatcgagcgcggcctgcggcgcctgcttaccggtgaggctcagttcaagcgcggcgttggccggcccccacacttcccccatctcgggaatgcccggcatcgccaccgctcgcgccgactggatggcgacggcgctggccttttggtcgtttttaatcaccggatcgtcaatcatcgccttcagcggcggaatttcgccagtggcgacatagcgggctttcacatactgcggctggttgatgaactcgataaactgttgcgccagcgctttgtctttactccaggtcgatactacatagcctttgacgccgaggaaggagctcatcggcttgccgtccggcagggtcggcaggggcgccacgccatagttaatgccagcggcttcatacggctggaaggcccaggggccgttgatcaccgccgccgcttttttctcggtaaacagggaatcgatggcattcagcccgttatcgccgaggatccccgccggaaagaccttctcggcatagaattttttcaggaaggtgacggcttcgacggcgccgggggtattgagacccacctgctgcgggttaaagccgccgctgtcgtttttagcaaagatatagccgcccatcgggccaatcgccccccagctgtaatagatctggtcaaacttggcgagcaggccgtatttgttctgctcgcgctgggttttcgagtagtccagccaggcctgcaggctgtccagcggcttgtcgaccaggtccttgttgtagataagcaccagggtttccaccgccttcgggatcccatacagcgcgttgtccatgcggaaggcattgatggaggctggcgtaaaggcatcctgtttcgcctgatcgacgctgagcggcgagagtagtccctgtaccacggcgccgccgagctggtcattcgggatcaccagcacgtccggcccaatgcccgccgggccgtcgaggcgcagtttttccagttgctgggcgtagggcatctcctggagattgaccttcacgttgtactgcttttcaaaatcgctaaccgcggttttgatgccagcggattttttaatgtcctcccagacgttgagctgcccggcggcatgcgcctgcaggctggcgagttgccccgccgccagggtggtaaggatcagtgcagcaagcgtgttctttttcattatcaacctcatgtgaaggtataacaatttaatggtttttatttgatttccgtctgccagttagaaaaataaatcttttcaaactgccgtattacgtggaaaacatgttctgatgcgcttttgttatacgctacgctttgatcgttgataaaactaccataagctgccagttgtgtgatcatccttgcagaaatgaaacgtccctgtatggcgcaaaatccgcggaagttatagtcagggcatgattttactgctgttgaacatcgtcacactgatttgttacacgtaatacaaatcacactcaacatagcgataagccaacggcaaataacagctactcactccggggaatgtggatgtccaatatacgactgaggaatgtcaccaaaaggttcggcagcacggtgacgctgcaccaggtcaatctcgatattgaagatggcgagtttgccgtcttcgtcggcccttccggttgtggaaaatcgacgctactgcgcatgattgccgggttggaagaggtcagcgaaggagaagtactgatcggcgatgaggtgatgaatgatgtcgtgcccgcccgccgcggcgtggcgatggtcttccagtcctatgcgctctatccgcacatgacggtggcagagaacatgggctacgggctgaaggtgaataaagtgccgaaaacggagatccgtcgccaggtggaaatggtggctaaaacgctgcagctctcgcacctgctggatcgtaaaccgaagcagctctctggcggccagcggcagcgcgtggccattggccgggcgatcgtgcgtaatccccgggtgtttatgttcgatgagccgctctctaaccttgatgcggagctgcgcgtcgatatgcgcctgcatattgcccgtctgcaccaggagctgaagaccactatggtgtatgtcacgcacgatcaggtggaggcgatgacgctggccgataaaatagtggtcatgaactacgggaaagtcgaacaaatgggttcgccgatggcgctttactacaatccggtcaacaaattcgtcgccggctttatcggctcgccgaagatgaactttctgccggctatcgtcagcgactggcagccggaacgcttaacggtcaccctcgcgcaggaccatcagctggccctgaatatcgccacccagccgctgaagcccggcgctgcggtgacgctggggatccggccggagcacctcaccccggaagtcgccaccggtaccgtagtggagtttcaatgtgaagtggtggagcgtctgggcaacaatacctatctgttcggccagtgctacggccacgataacgtcaaggttttgctgcccggcgacgtccatttccgcccgtggcagaagattaatctggccttcgacgaccgcttctgcatggtgtttgatgagaacgatctgcgcatcagcgccgacatcacggctccggatgctcactagctaacatattgctgtcatctgcgcagcgtatgctgtgactgaatgccggaatacaccctgcccggcattcacaccctcatttttattctgctgcatcggaatcatccttctctcccggcatcgcaggcacttgtgatgccggcttttttccctgagcggcattctttctcccgctgcgccgggcttatctttcgcatatactgatgacacccggcgaacgataaggacacaggcatgaggacccggcatctgatggcgctgtttacaggagtgctgatactggccatcatcctgcccatttcactcagcatctggcaggcggcgcggcaggccaaaatgcagttctatcgtgaactggatgactattccaaccgtatcgtcgttcggacgctgcaggttgccgaccaggcccgggaagcgttacgagaggctgacgcacacaccgccgcctcctgtagccctgaacatctgcttacgctccgccgcatcgcctatacccatcgctacattcaggaagtgctctggctgcgtgattccgtgccgcaatgctcctccctggaagaccatagcgtcgcggtcaccttccccccgccggaccatattgcccccgacggctatcgcacctggctgacctcaattaacgatcttggcctcgatcatcagatgacggccatgggcagccggcagcacatggtgatgatcgaccccgtctcctttattgatgtcgttcccgccagcgaagagaagatccataccatgctgtttggcctggaccaccagaaaatggtgatcagcagtcagccgctgccggcgaaagtctggcaacgcattaaagatccgcatgtggatatgcttactctggataacacggtctaccggatccagcgcattcccgagctgggctctggcatcgtaacctggtcttcaaccttgccgctgcagcagcgcattcgacagcagctgttcttctggctccctgccggcattttcaccagcctgctcgccacctggctgctgctgcgtctgctaaggcacctgcgctcaccgcgcaacagcatgctggacgccctcaattccgaagcgattcaggttcactatcagccgattatttcgttgcaggaagggaaaattgccggggcggaggccctggcccgctggcagcagcccgatggcacttttttatcgccggatatctttattcccctggccgagcagaccgggctcatcacgcagctgacggaagatatcgtcaggaaaatttttgccgatctcggcccctggctgcggcagcggccggaagtgcacatctccatcaacctgtcggtagatgatttacgctcgcccaccctgccgacgttgttgcacaatcagctacagcactgggggatcgccgccgaacagatcatccttgaaatcaccgagcgcgggtttgtcgacccggagaccaccatgccggtgatcgctcactaccgtcaggctggccatcggatctcgattgacgatttcggtaccggctactccagcctgagctatctgcagaaactggacgtcgacacgctgaaaatcgataaatcttttgtcgataccctcgagtaccggccgctgacgccgcacattattgaaatggccaaagcgctcaatctggccaccgtcgccgaaggggtggaaaccgaaagccagcgcgactggctgcgccagcacggcgttcagtacgcccaggggtggctgtacagcaaagcgctgccaaaagagcagttcattctgtgggcagagcataacctccatgcgcattaagcggcgggtggcttgagcggaacgtcaggaggcgctacttcagataggatttaatcacctgcatcaccgtctccagatccgcttcgcgctgcgtctcgtcaggctctttcaccacatggtcggtaagatgcccctgaataacctgcagcatcatgccgttgaccgcgccgcggatcgccgccagctgctgtaatatttcagcgcactcatgctcgcgattaagcattttctctaacgcgatactctgcccctgaattttcttcaaccgggtcagtaacatctttttatgtcgaactgtatgtgacattgcacgatccaccgtttcattctgtccgggattaccgacctgcgtggtcagcaacgcctgccagcataccatgatcctttttattagccgctttatctactggggggtagtattttactactgggggggagtaggataatcgcacttttggcaaggatcccgatatgaacgatttcacttcccttctgcagcagggcaatgcctggctgtttatacccagcgcaatactgctcggcgcgctgcacggcctcgaaccgggccattcaaaaacgatgatggccgcctttatcgtggcggtacggggaacgttaaaacaggcggtactgctggggctggcggccacggtttcccatacggcggtggtctggctgatcgccatggccggcctgtggtttggccgcggctggaacgcccaaacctctgaaccctggtttcagctggtctcagggattgtcattgtgctgattgcctgctggatgctctggcgcacctggcgcgaatcgcagcctcacacgcaccatgagcaccaccatgaacatgagcaccaccatgaacatgatcaccaccatgaccatgatcaccgccatgaccatgatcaccgccatgaccatgatcaccgccatgaccatcaccatgcgtcctcatccgccgcgccgctggtggcggagaagtggcaggacgcgcatcagcgggcccatgctcaggagatcaaccggcgctttgatggccgccaggtgacgaccgggcagatcgtactgtttggcctgaccggggggctgatcccctgcccggcgtccattaccgtgctgcttatctgtttacagctgaagaaattctcgctgggcgccacgctggtgctgggctttagcgttggtctggcgctgacgctggtggcttccggggccatcgccgccctgagccttaaacatgccacccgccgctggccgtggcttaacgacctctcgcgcaaggcgccctggttctcaggcttactgattattgtggtggggatctacatgatgcttcatggcctgagcggcctgtaagcgatgaaaggccctctccgtgatgaagagggcgatgggttaattcaggagactatttcccggggagggctgaccgcgttgcggctgacgggctggctgaaccacggtaggcacagctggatcagcggcccaatcgacagcgcgtagatgacggttccgacgccaaatttgccccccagcagccagccaatcagcagtacggaaagctcgatcgccgtccggataccgcgcagtgaccaaccagtgcgagcatgcagaccggtcatcaggccatcgcgcggcccggggccaaagcccgcgccaatatacattccggtagcgatagcgttcagcacaatcgctcctaccagcagcgcactgcgcgccaccatcgactccagcggcggcaggacggccagcgtggcgtccgccgctagtcccagcacgatgacattgctcaccgtgccgagccccggcatttgccggatcgggatccacagcagcagtaccgccgcgccggtcaggataatcaccgtaccgaaactgatacccagctgtttagccaccccgagatggaaaacatcccacggatcggcgccgagattggcatgcacgaagagcgccgtggacacgccgtaaagcaccagaccaatatataactgcagcaggcgacgaagcatattttttcctcaacatcattgcgaatgccctaatcatcagcaaaaatggactgataattaatggccagttttggaaaagtggatcgctatgtcagcccgacgctttggaacccaatcgctggtacgcctgctcggcaactggcaggagaccagctcacgcacgccgctatggcgccagctggcggaagcgctccgcctgctgatccttgatggtcgcctgacgctgcaaacgcgcctgcccggcgagcgcgagctggcggcggccctgaacgtcagccggaccaccatcgccagcgccctcggccagttgcgggaggagggctttctctacagccgccaggggagcgggtcacgcattgttttgccggaacgccccgccgatcttcctctgcctgccggcatctcatctacgcttaatctatctaccgccgccctcagcgccgggccggaggtccatcaggccttccagcacgctatgaccctgctgccgccctatctcgcacagactggctatgaccagcaggggctgccggtgctgcgggaggcgattgcccggcgctacagcgaacgcggtctgccgacgcggcccgatgaggtgatggtggtcaacggcgccctcagcgccttcgcgctgatcctgcgcctgttcaccgggccgggcgatcgggtggttattgacgcccccacctatccgatggccatcagcgccattcagggcgcctcctgccgccccgtcggggttgcgcttccgcagcagggatgggactgcgatggactggcggcgactattgcgcagactgcgccgcggctggcgtggctgatgccggattttcacaaccccaccggacgctgtatggatgcccccacccgccagcgggttgcggacatcgccgccaggacgcgaacaacgctggtaatcgacgagaccatggccgacctttggtataacgcgccgccgcccccgccgctggccagcttcaatcccgatgccgcggtgctcaccattggttcggccgggaaaagcttctgggggggactacgtatcggctggatccgcgccagcgcgcggaccatcgcctcgcttattcaggcccgcgattcgctggatttgggtacgccgctgctggagcaactggcttgctgctggctactggaaaatgccgccacactgctgccgccgcggcgggatatgctcaaggcgcgccgggacatgtgcgaaacgctgatggcggaatattttccccgctggcggttttcgccaccggaaggtgggctctctttttgggtggaacttcctgacatgctggccaccctgttctctgcgcgtgcggaaagccaggggatccatatcggcaccggtacgcggtttgggctggaaggggcgttcgatcgctatttacgtctgccgtttacgctgccggatgaagcattgcgccgggccttctccacgctacaaccgctgtggcaaagccttgctgaacagaaggaaaatacacgtttgcgaaaaataatataagaaaatagcgacgggctgacttcagcccgtcaaatgaccttcatccatgaggtatatgagatgtttttataaaattgcctggctatcctgccctctggttatggcaacctaatgacagaaagaaggcaatttcattaatgctggcgcggaataggaaaccctttcagggaaataataaagccatcttcatcttttttgattttagcgccggtgtcacaccagtcggaagcaatgcgaaagaactcatcactaccgatattccagttcaggcggacgtgttttacgtatcctgagcgcaacatatcgcaagcttcgctatagttgctggctgtagagaattgttgtttcattttttcttcttcagaagttttcttaatgctttgatttctttaggggtaagtggcgtcgcttcctcttcggtatgctggctgtcaatgtcctcttccgtcacccccgcctcacctgctgactcctccagctgaaaagccagctgcagcagcttttccgttgccgttcccaggttctcgttattaacttccgcaaaatgacgcaacttttcttttagctctgcgtcaatttttacattcaaaaccactgtggtcatagctacgcttcccgtgcaataaaatcatcataattaatacacgaagttaacatgctgatccagagatatattttacagcatgagcctggcaacaaattcccatcagtaagatgcgctttatttatgacgtgcaaatgacattaatatttcagtagtatttcagatttatgacaagtaaatattatggaataaaagaagggggttttaacaacaaaaactaatatgcgatctttatcagaaattaattattgcaggagtaaaaaccggacaaatacaagggaaacaccaggcgagagaaatgggtgggggccctgccagctaggatttactcaataaaccccattattttcaatgcactataaagcggtgaggcagcgattttgtatcactataagatgacactagcaagccgttttctcatgcggcagacacaaaaaagaccggattgccccagcctcagattgttttcttctttctcaacttcaacagcgcttcgctgattgccttcacaaacccgttttgctcaacgtccatcatgaacgaggatagcggaaccttcaggaaccgacacacggcgctaacgttcagaaaatctaaaacgcgctcgtctgcaacagtgagcaacgggaactcgttgttcgtctggaattgaattttcatagtaatcacctcttctttgcctccagcaccgaaggtgtctcgcaatagcgagagtgcttcgcaccgtttagcctcgcctttttgggcaattcttcacggtggggccaaaagtcagccacaaaatccgctgtcttacgctgcgtcgttcgtcagttttgtaacgaaatccggacggtacacaacaggtaagattgagctttccgcgaatagatccacgttcttaaacttgtactgcacgctccagatgcaaaaatcacccggatcagcaaatgccgatccaggttgcggctggtagccgttgccacataaccgaaaggcagagcaatatcagaggacagcgggcggctgaaacgtggaacaaggaaggattgatccggaccaatccataaagattttggtccgttacttccaccactcgtacattttcgataatgaatgttgagaacgccgggagcacttctttattaaacagaacatcacgatcaagcacaccgaactgaacattctggctcacgtctggatgatacttgatgccgcgaaagacattgcttcctgcaaacaggataaatccatcaagctgaccagcaacgcccctataagcactttagcggcggttacagcatcatcgaggctgcgaagtgggtcaccagagctaacgttggtttttattgtcccggttacctgttgtatccaaattcatcttccccggaaatgatcggctgctaggtgtaggtcgcttcgacggtattacgaaaaagcacatcagcaaaaatccgctcacggataatgccgccacaggcttctggtgaagcgtagaagggattggtggagcagttcacaattgtgtggaaaaggtacgcatccgtgactactggaacgagagaatatcgccaagggatggctgaacttcaacccgttgtgggaacgtcgccgtaatagctcattttctgctggtaaggagaaaatactattccatcgtgtttgatgcgctggcagcttcaaagaactgcaaactgaaattgtgtggtgaccagacaaactcatccaaaatccttgaacaagagaactcacctcaaatcctcccgaatgctttccttctgttgatgaaatcgctgttgcataccccgcttcgcatcagcgttccgaaaagccatacctgatcattccagtcaagtacttataagaaccattatgttaaatagagcataaaatgaacagcaaaatgcactgttgtggcaagttttctctgtagtggtgctcttagtggttcaatggtgaaggcatcgctgggagtgtcggctgtaggatattttgtgaacattctttttttgcggagggtcagggttggcggtctagttgcggtccaacagagccaagatatttttaactgtaggatgttgtggaaaaaatatcatcagaaccgccacagcgggggatgggatgagttgccgggaattttacccggcagacggttataccaattaattaaacgtgcagttgcgacccgatggcgcaccaatgaataactgcatcttttcgcacgtaatggtgatcttctgccccttcttcaattttgacgctttcgacttctcagtgtcttccatgctcaagctgacaggcatgaaccgattatcgctttcaagtttaagtactacatcgttcgcgaaattttttgttatatcctgaacagttccggtgatttcaacgttacgaccatcaattttgtcatcagctgcaacttcattggcgctgtacaattcagccagagcttttgccgttgtacggtaaattccatcatcagaagctggcactttgggtttactatcggcaacctgcgattgttccggattagtcatactagcaacaaccgtttttataaattctttttgcatcatggtataggccgctgcaccaccacaactatcaatcgcgattttttctttggtgataagtttacctttttccttcagtccgttaccgaaaccagcccccaaaacgatagtattgtgtacaatatcgtaactcgccgtgtccttcttcatacccttcgttgcccgtttgatcaataggtcctcagaaccgcctttcaatgtttgttcacatccaacagtaatcaacgttttgacataggccgccagatagtcagggtatggttgtacatatgtagacagaacgccttcagagaaggaggagaaggaaaagaacataagaggtaatgcaagaatctttttcaaaacagcctccatagctaaatagattaagtacaccatcggcaggtgtctcaacgccattaattaccttaaactatcagaattataaaatcgaactttaaaattgatcaattaagttactatattcttccaaggatgtttactcggattgccatttagcattgtagagggcagatcattctagggggagatatgagaggaatttaattgatttgcggtactctggtgactttttatgccatggcaggaaaagtcaccatgcaactgacagaacagacccagactgccaacgggacgctgtgtcgttattccaattcaatgtacgattttatgtacaaaacgaacagtaagcattgtccaaacgtgaaaacattctctacagaggacaagtaaggttaaattctgtcaaaatcagaattgcagcggcggcaatgccaatgcttatagtcgtatgatcccatcataccgacgaccttctcccttgcttccatgtggaatttaatattctcactttcatagcatttagggcaaaatgctattttatcaccctctttccaccaaataccgttttggaacatgaaggcttgcttatcctttaactgctcctccaattgcttgttcttttattctgcatcaaaaagtagcgcttgggtggtgataacttccatcttaacacttgcaagctctgtcatgaggtttgcaagctcaagtttaagcgtcgccttatcaagctcaccgccatcatctgcaagtttctttgcgataccgacagctttatcaataatgccaacagcggcagctgtacttgctaacattccagacatattgtttccttaaactaacattcgattcattactgcttcagacgcagttttaccataactgactaaatccataggcccgatgtaattcacatttggagggaaggttcggtacatgtatttatgcgccgttgccgctgctgcaatcgccgtatcaaactcaggtgttgaaccgttcgaaaaatgttcagcgttgaaatgcgcgattacattgcttctgaattcagtcattttcttccaataagcatgaaattcggttggcgtcgttcgcagttcatcgaataaaaactttcgaaacccatcgtgatcatcgattacacatttccagtgagtagcctcagcatcagatccaaaaactttgcaccagtgtatcgcggcatcaccaatcaaggcattgcaaacccctctgaacgggaataaatcaccagtcccacgatccaagtgttctagaacgttagccagcgcgaaaaaagtatggatggatcgtgaaaatatcgttaagcacatcatactgttttcaatcgcttgtgccttttcaacattcatgcctttacccctactattttagtgattttatatggtatgcataataaccaagcactgaataatggtattagtattaattactaagtttatcaatcatatagctagatataacccccgccatctcaatggcagcttttgcctcactttcttttatcgttggtaaccaaggcctcccatgtccagttccctgcttatttctcaatttattgataccaatggcagtgttaaacatcccccgctccattgtacgatgaggagcttcaaaattttcgttcttatcttctggtgtggctaatccaagagcgatgaatgcctgtccaagcaaggcagcaaaattagcttgttgaggataggtcccaaatttttgggtgataacatgtgctgctgttgcttccaaaagatccttactggttccagagagaagtgctgcatcttcagcaccgcgcctcgctctatcagcatattttctcaatgcttcagttaattcacgccctcgaagaccttcaatactttgacgaactaaagagccctcttctgtcaaaattagaccttgttctctaaaggcttcaattgccccttggatggcatcgcgtcccgcatagttggtcgactctggtctaaaacctccagataccttaacatcctgcaaaagcgtcaatgccagtttatatccagcttcaggatcgttatccaatgcccaagagaggacagcacgaactcgtttagccttacctacaacttgctgattttttggatcaacatgtgataagcaatgtctttcaaaagcataactcaaatctgaatgagaaggtgacctaggggcatccgcctgtgcatctccaacaagacgagctattgcaaccaagatgatctcggtaagaacaaatttcataattaaacccttgttattccagccctatatcgataacgactttatccccacaaagctaccagcacaaccatcatagatacaccaccaattcaaccaatcgcgagacatcaacgcccttcccgtatcgattgtacgtgatcgttgcattcgagtgcccgagtacctgcgaagcgaactgttcaggaaaaccattttgtttaaatgttgtagcgacgtagtggcgcaatgaatggtactcaggtaaaccatgcttaccccggaaccgtgtaaaccaacggctgaaatagtgaccataactgccaaggtgcaaggttagctcagggaacaaacgccctttcctaccgttgatgaaatcaagcaggccaagtaccaacaactgagaatggatcggcacgaaccgccgtgaactgtccgttttaagcgtctgattcggattcaagttatcaacacggaagcaccaaactccgtcaactttcatcacgtcattgtggtaaagctggcagatctcattctgcctcatccctgaatagcgaccaatcagaatgatccaccgcttccaatccttcacgccatgtaaagcaatgtgcaatcgttttagatcgttgagcgtgtgtgctggacggcgatccattggtgcggttgtttccttaacacccatccttttcaaatgggtttcgaatgtcatcatccgtgcgagttgcaagccatttgaaaacgccgagttctttttgatgtaacgttttctggtggatgctgaaccttcaaggccatcaacaaacggcgtcgcgcttcttttgttgaaagactctttgtagaattcagatatgcacttacgcacctgttgatcgtcaatatttcccgttcaccaacctctcctgttttagcgctggtgtacttatcaagctcactcttcaggctcttgaaaggccttttctgttgtggttgtttgaaggaagcagaaggggttgcagtgtgtgccaggatggactacagaacgcaatggaaaggttgtgaggtgagatatttctccacacggagcaaggcttcacgcttggaacatgtgcgaagagaaatacgaatttcacggcgtttccgaggtgtcaggttgaccctacggtagcaccagatcccgtcacgggaaagcataagatgcgacattgattagcgtcctaagtgatacacgaaagttgtatcaccgccgtttcaatgcacgaaaatagagggttacatgatagatatcatacacttagcagaaatgggtgggggccctgccagctacatcccggcacacacgtcgtctgctctggctgcttccttccggacctgacctggtaaacagagtagcgttgcgggagaaccaacagagcccccattgagagcgttagttgcctaacgcgctggcgcattatccctgctgacctggtgaattgcaagctcacaccgtccgcctgctggtttattgcgcaataacgcgaataaaaccagccactcacggtcagcctgtgagattgcgagcccgcgctcagcacacatccgggttatccaccatacttatcctcttcgtcctcttttatcaccagtacattgtctcgacggtaatcgaatgactgactcatcaccacagaccatcactctgcctttacctgctattgaagggatgaccatcgcctttcagggcgtaaactacctgcgtcctgaaaaaatgctcgacttcgcgaccatcagtcccgcgccggtgcgggcggttacgccgctggcgctgctctattccaccgtcggcgtgctgcgccaggtggagctacgcaagctgccggtctatatcagcggtcgggtggtgtaccctatctcgtcgttaaccatgccgggcctgcgcgcgaggctgatcatcaacgccacttcgcagcggttgaaatttcttgaaagtctcatcgccagctcagcctccgacaatgtccatggcatgcagatcctcggcctcgctctgacgttcaccgtcgaacaggccgcctgacccaggccggctgtacagctcctggcttagcgcttatgctgacgttttgccggtaacaggacagaaaatggctccgcacgacacatttccccaacgcgtctggcacatcgtggcgtcgataccggaagggtatgtcacgacctacggcgaggtcgcccggctggctggttcaccgcgcgcggcgcgccaggtgggcggcgtattgaagcgcctgccggaagggtccaccctgccatggcatcgggtggtcaatcgccatggcgatatctccctcaccggccccgatctacagcggcagcgtcaggcgctgctggccgagggtgtgcaggtctccggcagcggccatatcgatcttcagcattatcgctgggtttattgaaggcaaaaaaaaagcccccatccgggggcgtagcgagcttactgggcgacaggaacggcggtctgctggaccggaaccagcgtcaggtcggcatgagtgccgccctggtttattaccgtctgcacggtatcggtaataaacatcaactggccgttaaccgtgatcgccgcgcttagcagaatgcgagcgttcggttgaatatctgccgggttgtaaggcagcgcaaagttaaatggcgcctgtttgccttcggtacgcaccgctttttgcgacaatacgcgggctggcgcatctgccagagaagcatccgacagggtcaccgtcagtaccgcatccggcggtaaagcgattctctggcggatattaatcgtccccgtgacgctcggctgctgctgcgccacgctcagcgtcgcgataccgtaagggtcgggcgcggccgcctgcgtcgaagaattgttcgagtggtgattagcacaggcggtcagcgtcgcggcgacggctaaggcactaaacatataggcaaatttcatgatgttctccttatcatcccttaatacccaggaggatgttccgccgcttcgccggcaggaactttcgtgtcgtcaataagtgtggcacagatctcagatttgttcctgttaactggtcgttattcagattattacacccatcggaccacttgcgattccaggttatacttggccacattacgcgcgctgcgccgctattgttaattgaggataagtatgagtcaggcactctctaatctgctggcattattagatctggaaaaaattgaggaagggttgtttcgcgggcagagcgaagacctggggttacgtcaggtttttggcggccaggtagtgggtcaggcgctgtatgcggcaaaagagaccgtgcccgttgagcgtctggttcattcgtttcacagctactttcttcgccccggcgatagccagaagccgatcgtttacgatgtggaggtgctgcgcgacggcaacagcttcagcgcccgtcgggtagccgccatccagaacgggaagccgattttctatatgaccgcctccttccaggcgccagagaatggctatgagcatcagaaagcaatgccggccgccccctcccctgacggcctgccttcggaaaccgatatcgctcgcaagctggcgcatctcctgccgccgcaggtgaaagacaaattcctctgcgataaaccgctggagatccgtccggtggagtttcataacccaatgaaaggccatatcgccgaaccggtgcgccaggtctggctgcgcgccaacggcgccgtccctgacgatctgcgtattcatcagtatctgctgggctatgcttcagactttaacttcctgccggtggcgctgcagccgcacggcgttggtttccttgagcccggcatgcaggtcgccaccatcgaccactctatgtggttccaccggccgtttaatattaatgaatggctgctttatagcgtcgaaagcacctcggcctccagcgcccgcggcttcgttcgcggcgaattctacacccaggatggcacgctggttgcctcaacggttcaggaaggggtgatgcgcaaccgcaacgcataaaaaaagcctcccggacgggaggcttttcgctatcaggagagaatggcttttttatcaggcgttataggcgttttcgccatggctgttgacgtccagcccttcgcgctcctgctcttccggcacgcgcagcccgacggtcatatccgccactttgtagccgatgaacgccacaacgccggaccagaccacggtgatggcgatactttccagttgcaccagcagctgatggcccatggtgacgccttccgcataaccgacgccgcccagagaagtcgccgcgaagataccagtcaggatacagccgacgatgccgcagacgccgtgaacgccgaagacgtcgcaaggatcatccacacgcagccagcgtttcagcgcagtcacgccccagatacccgccaggccagaggcgataccgacgatcagcgccccgccgacaccgatataaccacacgccggcgtaacgccaaccagaccggcaattgccccggagcaggcgcccagcagtgaaggtttgccgcgcagagcccattcgccaaaggtccacgccaggatagccgcagcggtcgccacgacggtgttaacgaacgccagggccgcaatttcattcgctgcgctggcagagccggcgttgaagccgaaccagcccacgtagaggatagcggtgccagtgaacaccatcggcaggttatgcggtttgaacgcttctttgccgaagcccacgcgtttgcccatcatataggctccgaccagcccggcgaccgcggcgttgatgtgcacaacggtgccgccggcgaagtccagcgcgccatgggtcgccagcagaccgccgccccaaaccatatgcgcaatcggcacgtaggagagtgtcatccataccaccacgaagatcagtaccgcggagaaacgaatacgttccgccagcgccccgacaatcagcccgacggtgatgcaggcgaacgagccctggaaggccacgtggatatactgatagaaggtgcccatcagcgctttcagctcaatatttttcagcatcacccagtcaaagctgccgaagaagctgccgccggtgccgaaggccagggtatagccataaatcacccacaatacgcagaccaggccaaaggtgacaatcacctgagtcagcatagacagaacgttcttaccgcggatcaggccgccgtaaaacagcgcaatccccgggatagtcataaacagaaccagcgcggtgcaaatcatcataaacgcgttatcggctttgtccgccaccgcaggcgcggccatcgccagccccggcagaagggttaatgcccccagacccgatttcattgttgccattttcattgtttcgttccccatcactgtgtggtctggaaattacagcgccgcttcgtcagcttcgccggtacggatgcgaatgacgcgctgcaattcagcgacgaaaattttgccgtcgccaatttttccggtgtaagccgctttgctgatgacatcgatgacttcatccagctgatcgtcggcaatcgccacatcaatcttcacttttggcagaaagttgacgctatactcggcgccgcggtagagctccgcgtgacctttctgacggccaaatcctttgacttcagtgaccgtcaggccctgaatgccgatggaagacaaagcttcacgcacgtcttccagtttgaatggtttgattaccacggtaaccagcttcataagtcccctccagtcagtattcggtaatggccgcagctaacacgatggatataaagcaagggctatgccagaaatgaaaaaaggccgcaaagcggccctttgatggcaaaaaacaggggacaggtcaggcaatatcctgcgcaacggcacctggcgcgcaaaaatgcaccacaacggtgcatttgatgtaacgtttttgcaccatggcaggcctcccagcgttccctgcctgctggtggtgcatcaggcgctgagcgactcctctctggcgctggccgccagctcttcgccggccagctgcagctgatacatctgccagtagcggcctttcgccgccagcagctgctgatgggtgccccgctcgacagcctgacctcgatgcagaaccaggatggtatcggcctccacaatggtcgacagccgatgggcaataaccacgagggtggtatgctggcggaccttcgccagcgcctgctggatcgcctgctcggtaccggagtcgatgtttgccgtcgcctcatccagaatcagtacctgcggggtgtccaccagcacgcgcgccagcgccagcagctgcttctgcccgacggagagattattgccctgctcgcccagttgggtgtacagcccatcgctcatgctgcgcgccaccgccgccagctgcaccgcctccagcgcttcccaaacctgcgcctcactgatgtcccggcccagcgcgacgttggcgtagaaggtatccgccagcactacgggatcctgttgcaccatcgcgatgccccgacgcaacgcgctgtggctgagggatgcgagcggtcgaccatcgatgcggatctcgccgtgggttaacgggtaatagcccatcatcagactggcgagggtactctttccgctgccggtatgtccgaccagcgccacgaagctgcgggagggaatatccagcgtgatatcctggagaaccagacggtccccccggtaagcaaaggagagatggtcaatttccacccgaccgctgctcagcggcgcgtcatccgcaccccacgcctggcgcgggcgatccatcagctcgaaaacgcgctcgccggcgaccaccgcctgctgcagcatcgactgctgggtggtcagctcgataagcggctcgttaaggcgtccaagatagctgataaacgcgtacaggaccccaacctcgatcgtgcccaccgcgctaaagccgaacagcatcagcagcccgcacagcaccagcgaggaaaaaaggctcagcagcgggcgcagcagaaaaccgtccaggcgcagcgtctgcatccgcgccagatagtgggcatagctggcctcgcgcatccgttcgccaaagcgcgcctgctggcggaactgctggatgacgcccatgccgttgatcacttcgttgaagccatcgttgatgtcggcaagccaggcgcgcacccgccgcacgatcggcgtgctatagcgctgatagataatcatcacgatcagcaccgccgggaaaatcgcgatcgccaccagcgccatccgccagtcgaggctaaacatcgccaccagcatcgcgccgatcagcgcggcgctgcgcagtaccgtagccaccaccgtcacgtacagatcgcgaatgacttccgtatcgttggttacccgtgagataagctgcccaaccggctgggtatcaaactcgctgagcggctgatgcagggcggcatccatcacgttgctgcgcaactgctggacgacgccgaccgcggcgcggttaaacagcagcgactggttatagtgcaggagcgccgccagcagctgcaggccgatataggctaccgccaggccggccaccagcttcagcggcagcgtatgtttcgccaccatgttgtcgatgaaatagctgataagcagcgggccgctcacttccgccgccgccgcaatccacatcatcgccaccgcgatggccaacggcttgcgccacggtgaaccataggccagcaggcgtttaagcgtcggccagagttcggtaaagctacgcatccagggcctcctcttgcgtctgcggaacctcgtcgagcgcggcctccagctgctgatatcgatacatgtcgcggtaccagccgggctgcacggccagcgcctcgtggcggccgcgctgggcaatatgcccatgctgcagtaccaaaatttcactggcctcggtgagcgccgacaggcggtgggcgctgataatgaccgtccgcccctccccccactggcgcaggttatgcaggatctggtgctcggtgcggccatccaccgccgataaggcatcgtcgaggatcaaaatttcggcctccagcagcagggcgcgagcaatcgagatgcgctgtttctggccgccggagagcatcacgccgcgctcgcccacttcggtctcgtagccctgaggcagacgcagaatgtcgtcatgcacgctggccagttgtgcaacccgctcaatctgcgcctgcgtcgcgtccggttttcccagcgcgatattattggcgacggtatcggagaataaaaatggcgtctgattgaccaccgccaaccgggcgcgccagctgtcgagctgcagaatcggcagcggcagatcgtgaaagcggatctcgccgtgagtgacgtcaaaatggcgctgcagcagcgccagaatggtgcttttgccggcgcccgtcggcccgcagatgcccagcatttgccccggctggagagtaaaatttacctgctccagcgaaggtttgctcgcctgcggatagatgaaatcgcgaatagcaacctgcaggacgccacggcctgccggcaccgcctcggtcccgtcatccaccgccggcgcctcttcaagcatcgtgcggatacgaccataggccgcgctaccgcgctccacgatgttaaacatccacgccagcgccagcatcggccagatcatcaggccaagatacatcacgaagctggtcagctggcccagggtcaggctgccgtggatcaccatccagctgccgccgccgatggccagcaggttagcggccccgatggcgatatagatggtggggtcgaagcgggcgtcaatgcgcgccacgcgcatgtttttcgcgccggtatcggcagcatcggcagcaaactgcgccgactggcgatcctccagcccaaacgccttaatcatgcggatgctggtcaggctctcctgcgtgcgatcgttgaggctggaaaaggccgcctgagcaacgcgaaaacgttcgtgaagcgcatcgccgttacgtttgatcgccagggccatcagcggcatcggcagcagcgccagcagagtaagctgccagctaatctgcgtcgacatcacaatcaataccgcacagcccatcaccagggaatccaccagggttaatactccttcgccagcggcaaacaccacccggtccacgtcattggtggcgcgggcgataagatccccggtgcgatggcgcaaatagaacgccggatgctggcggctcagttgccggtaaaaatcttcccgcagctcaaccgccaactggtaagaagcgccgaacaacagcacgcgccagacatagcgcagcaggtagaccatcaccgcgatcagcaccagcgcgccgatccacatccacaccttctccgcggtgtaatgctgttgcgtcacgccgtcgaccacaatgcccaccaccttcggtggaataagctgcaggacggcaataatgaccagcagggcaattgcgccaagatagcggcgccactcccggcggaagtaccagctgagttgagcaaataatcgcaagcaataaaatcctgattttgtaatgggttacggcgcaataccgttattcgacaggcaaggcggtggtatattttatctgttccatggcaaaactcgaagtgacatccgacagaccgggcacactgttcactaaacgtttataaaagtcgtcatagcgtttcatatcagccacctgcacccgtagcaggtagtcatactcccccgccatccgccagaagccgagcacttccgccatctgcgtcacttcgctcacgaactgacagtaccagtcgctgctatgatgctgagtcttgatcaggacgaacgccgtcagccccagccccaccttttccgcgtccaacagggcgacgcgcccgcggagaatgccctcgtcttcgagccgtttcaggcgtttccagcagggcgtggtggtcagattaacggcatcggccagcgcctgcaaagagagggtgcaatcttcctgcagtagcgccagcagcttacggtcaattttatctagcattgggcatcctcagagaaaattttgctctcataatggtaatccacaggttaaatggcaacaatttttcctgcgctttccgctaagctaggcacaaaatgacaaacaggaaatcacgatgaatagcgcctgggttaaacatgccattagcgaaatcaacgctgactatcagcgctccgccgacacgcacctgatccgtctgccgctgcccgcttttccgggcatccacctgtatctgaaagatgaaagcacccaccccaccggcagcctgaagcatcgcctggcgcggtcgctgtttctctatggcttgtgcaacggctggatcaaagaaggcacgccaattatagagtcctcctcagggtcaaccgccgtttcggaggcctatttcgcccgcctgctggggctgccgtttatcgctgtgatgccctcctgcaccgccaagcgcaaaatcgaacagatcgagttctacggcggacgctgtcattttgtgcagagcgccggcgaaatctacgcggcttccgaaacgctggcccgcgagctgaacggccattatatggatcagtttaccttcgccgagcgggccaccgactggcgcggcaacaacaatatcgccgacagtattttccgccagatgagccatgagccgcacccgcagccgtcatggatcgtcatgagcgccggcaccggcggcacctcagcgaccattggccgctatattcgcagccagggctacgagacgcagctgatggtcgttgatccgcagaattcggtgttcctcgattactggcagacccgcgacgccagcctgcgcagcccggtcggcagcaaaattgaaggcatcggacggccgcgcgtcgagccgtcgtttattcccgacgttgtcgatgagatgctgcgcgtgccggatgcggcgagcgtagccaccgccctgtggctggaaacgcagcttgggcgcaaggtcggcgcctcgaccggcaccaatatgtggggcgtattgcagctggccgcgcggatgcgcgaagaaggtcgcaccggctcgatagtgacactcctgtgcgacagcggcgagcgttacctggaaagctattacaacccgcagtgggtggcggacaatatcggcgatattgcgccctggcaggcggagatcgccggtctggtcgaaaggcgataaaaaaagccagatagaagcctatctggcttgctggaagggtctctctattcgggggaataaggaagatcaggattatccagccaatgagttaaaaaatgggagactgcctgattccggcagtcgccaattaccggcagatgcggcagctcggctttcagctgtggcatcgcgttgcccatgatgaacccccgcccaacgctgcccagcatctcgcggtcgttcatcgcatcgccgaaggccatgcactcctgcagggtgaagcctaaatgctggctgagcaccgccagcgccgcgcctttattgcagccaaccggcagcacctccagacagtccattgccgagaagcagagaaatgcgcgatcgcccagcgtctcattcagctggatccgcagacggcgcaaatcgtcatgatcgccgcagaaacagatcttggtgacatgctgcgccgacatacgctttagatcgcacagttgatagtgaaagccgctgaatacatgcgcttgcaacaattcaggccttgcctggccggtgaaccagccgccatcgttaaagacgtgcatgctggcctgggtatcccatttgccgtgcagcaccgcttccgccgcttcgggagcgagatcctggcgataaagctcctccccttccagcgaatggatgcgcgtcccgttgccggtgatcagaaatgcatcaagggaaaattcgccaatcacatggtgcatctccagcacatggcggccggtggcgaaggtcaaggtgatatcgcgctcacgcagccgtttcagcgcggaaagcgtcttttctccaagacgatggtccggcatcagcagggtgccgtccatatcaaatgccgccagttttgccatggtattttccccgatgtgtgatgggcttcgcttgtgttgcagtatctcctgggatatacggaagtaatagtgaatagatattattaattgttccgggtttacagcggcccggtggacgacggcccccatgcgactcttacaccgtttaaatcagtaccagcgattgtggcaaccctcagccggggcgccgcagcaggtcaccgtcggcgaactggcggagcgctgtttttgcagcgagcgccacgtccgtactctgctgcgtcaggcgcaggaggccgggtggctaagctggcaggccagctccgggcgcggcaaacgcggacagctctcatttcacaaaaccccggaaagtctgcgcaacgagatgatggagcaggcgctgaacaacggtcagcaacaaatcgcgctggagctggcgcagcttgccccggtggagctgaaagccctgctccatcccttcctcggcggtcagtggcaaaacaatacccccacgctgcgtattccttactatcgcccgctggagccgctgcgtcccggctttctccccggccgcgccgagcagcatctggccggacaaatctatgccgggctgacgcgcttcgacgaaggcgacaatatgccgatcggcgatctggcgcaccactggcaggtctccccggacggcctgcgctggcatttttatatccgctccacgctgtgctggcacaatggcgatacggtggaaaccgtgcagttgcgacagcggttactgctgctgcttgagctgcccgccttgcggaccctcttcgccagcatcagccgtatcgatgtcacccatgcccagtgtttaacaataaccctgcatcgccctgactactggctgccgttccgcctcgccagctactgcagcgtgctggcgcatcccgacgatccggccattggctgcggaccgttccgcctgaagcggtttagtccggaactcgtccgcctggaaaaccatccccgctaccacctgcagcatccgctgatccaggcggtggagtactggatcactcctcagctctttgaccgcgatctcggcaccagctgccgccatccggtgcagatcaccatcggcgatcgcgaagagctgcataatctgcgtcaggtcagcaaccgtatcagtcttggcttctgctatttgaccctgcgccacagccctcggcttagcaaagcgcaggcccagcggctggtgtcgataatccatcactcgtcgctactggatacgctgccgctggaggaggatctgattacgccaagccatgaggtgctgccgggatggtccatcccgcagggaccggcaaacaacgcggtaccgcttccggccaggctcaccctgctctatcatctgccggtcgagctacatgcgatggccgaacagctgaggcaacgtctggctctgctgggctgcgagctgacgctcctgttccacgacgctaaaaactgggaaggctgccaggatctggggcaggccgacctgatgatgggcgaccgtctgatcggcgaagcgccggagtacgccctggaacagtggctgcgctgcgatatgctgtggcctaatttgctgaccggggcgcaatatgctcatctgcaggcgacattagacgcggtgcagtctcagcccgacgctcgcagccgcaacgatgcgctgcgcaacgtatttaacagcctgatggaagacgccatcatgacgccgctgttcaagtataactatcggatcagcgcgccaccgggggtcaatggtctgcgcctcaacgcccggggctggttcgacttcgccagcgcctggctgccggcctcgtcgacgtgagagagctggtgatagagggcgtctggcgctaccatatcgcctttattcatttagtcaggaattgccatgaaacgcgccgtagttgtcttcagcggaggacaagattcaaccacctgtctggtgcaggctctgcaacagtatgatgaagtgcattgcgtcacttttgattatggccaacgccaccgcgcggaaatcgacgttgcgcgcgaactcgccctgaaactgggcgccgtcgcgcataaagtgctggacgtcactctgctcaacgaactggcagtcagcagcctgacccgcgataacattccggtaccggactatcagcctgatgccgagggtattcccaacacctttgtccccgggcgtaatattctgtttttaaccctgacggcaatctacgcctatcaggtaaaagccgaagccatcatcaccggcgtgtgcgagaccgacttctccggctacccggactgccgcgatgagtttgtcaaagcgctgcaccacgccgtcagcctggggatggcgaaagacattcgctttgagacgccgctgatgtggctgaataaagccgagacctgggcgctcgccgactactggggtcagctggatctggtgcgccgggaaaccctcacctgctacaacggcattaagggcgatggctgcggccagtgcgccgcctgtaacctgcgcgcaaacggactcaaccagtatctggcggacaaggtcggggtaatggcggtgatgcagcaaaaaaccggactggcgcaggcataatctccggggatcgatttaccggagctttgactcaaattccccggtggcgcgatgcttaccggggctacgggttcatcacctgccgtgggcccgccactcgcacgacggttgtcagcgcaggttcatctggtcaagtttcgcacgcaattccccttccagcggcagcgccttctgggttttcaaatcgatacaaacgaaggtaatcagcgcatcggccactacttcgccattggggttgagggtgaccacctggcttagggtgccgcttttgccgttgagttgctccagtttgctgctcaccgtcagcacatcgcccagtaccgccggacgacggtagttaatattgatattcaccaccacgaaggcgatgtttttctccatcatccactgaaacgcggggctgttttccaggccgtcccagcgggcttcctcaaggaactccaggtaacgtgcgttgttcacatgctggtagacgtccagatgatagccgcgaactttaatttgtgtctgcatagcactaatgcctttctgttattgttgtttatgaggtaagaggtcacaccacttgatgcaacctctttatcctggcaaaaaatcaccgctgtgcaaggtctgacataaaatttacagcgtcagatgggctaaattgcgctccaccaacgcgctccccattcccgggacctgcttcagatcatcgagggttttgaacggcccgtactcttcgcggtagctgacaatagcctgggcttttttcaatcctacgccattcaacgcctgcgccagctgttcggcgctggcgcggttaatgctgacctttgtcgccccgttgtcggcctcgccgggcaccgcttccgccttcgccgaagaggacgcctgcacattttctttattcactgccgctttgccgctggcgggtgccgccagcgccccctgtacgcctaccgcaaaaaccagaacgcccgcggccatcagtgcttttattccatatttcatgctgatatctccttgtgtgtagacagcaaggtcacgatagcgtcagtgcggatggtcgacaaaaggcaaatcacagaaatggaaagggccgcgaaagcggcccttgaggaatacatcgtgttgctcatttttgcgagacgacgcgaaattactgctgctggtcgatgctgtcgccgagcttaattttcgccgccttgcgcaggttgctcatcagcgcttcgaaagcgatttgggcattgttctgggtgatcccctgaaccatggccttcttctgctcttccggcatgctgccggctttcacctcatccagcgctaccagcaccacatcgccttgcatattgctgcccacgccgtagaccggtttaccctgctgcggcagcggcagggtaaatgccagctggctcagcggatcctggccggtacgagaaagcgtctgcggcgcgccaaagctcaggccagccgccttcatcgcttcatcgcctttgccgtctttcagcgccgccagcagcttgtcggcctccagtttcgcctgctgttccgctttattgtgcttaacgatatcgctaacctgtgccttcacttcggccagcggcttcaccgcctcggctttgtgttcgctaatgcgcagaacaaaagcgcgatcgccgtcaacggtaatgatatcggagttgctgcccggcgcgccgttctcacccaccagaccgccgttgaaaatagcgtcagcgaccggtttaaagttcagctcctccggcaggttatcgcggccaaaccagccggtttctacgaccttcagcccggcgacctgcgctgcgctcgccagcgattcattatcgttgctggccgcatcgctcaccttctgctgcagcgcgtagtaagcatccaacgctttttcctgcttcactttcgccgcaatgtcattacgcacgtcagccagcggcttcacctgcgccggctggacgtcgtccagacgggccaccaggaagccaaccgaggatttgatcacgccagacagctggcctttctctttcagcccggcatctttcaactcaggcacggtagaggcatcttccatccaccccatatcgccaccgttgcgggcagagataatatcggtcgatttttctttcgccagcgtggcgaagtccgctcctttttgcagctcggccagtaccgctttcgcatcggcttcagttttggtctgaatcacgctgtagcggttgcgctgcggctgagtgaactgatctttgtgctggtcgtaccatgactgaatctcttcgtcagaggcgctctcctgcatgctggcggcatccattttgatgtagctgacgcggaactgctccggcgccataaaacgggcctgattctgctgccagaaggcgttgatttcctcatcgctggcggtctgttttgccgccagggcatttacgttgatggtcgcttcgcggaccacccgctgttgagataccagcgccgccagctgatcggactcgcccggcagcatgaagtcggtacccgcaatggcgttaatcagctgctgcgtggtcagctggttacgcagcgcctgggcgtactgatcggtggtcatccccatctgggcgacaataccgctgaaacgctggttgtcgaacttaccgttcgtctggaacgcctgggtctggaagatcgcctgcttcacctgctcatcgctgatgctgaggcccagctcgcgggcatactgatccagaagcgactcatcgatcaggcggttcagcacctgctggcgcatggttttcatgtagttttcgttcgccgccagctcggagaattgatcgccaagctgctgctgcatacggttacgttcgctggcgacggcgttttcaaactgcccacggccaatctcctggccattcacttttgcggcatagtttttgccaccgccaatcaggtaaccactcaccccggtcaaaatgaacgagacgataatgataccgaaaataatcttgagcacgacgctgttggcggccgtgcgtaggttgtccatcatggtgtaacaacgctccgctgtagatgactttagctcgcgcagcatagcacgtgatggccgccgcgcgtgaggacgtattttgacaagaaaacagggtgattgtcagcccacaagtggcgataaacacacataaagtggtctgaaaaggcaataaaaaaggcacatctcacgatgcgcccttgtacttcgtcacattccctgacgggaaagccgatcagttcaccgcgtctttcagcgctttaccagcacggaagcccggcacttttgcggcagcgatagtaatttctttacctgtttgcgggttgcgaccagtacgggcggcacgttctttaacagcaaaggtaccaaaacctaccagcgcaacgtcatccccagcctgcagagattcagtaacagaagcgattaaagcatctaacgcacgtccagctgcagctttagaaatgtccgcacccgcagcaattttgtcaatcagttgagatttattcactgttctcttcctctctttataatttatatcgcacctgagtccttcatagtgcgaccgcgcagcagttatatcaggactgtcatgcccttacaacagcagttgtcgatgacccccctgccagcgatctaagttagctacacaaaaaaaggctggcaagtccgaaatgacttaccagccctatttttattagcgcaatttgcgcagaatcactatttcgcggtcacaacctgcatgccgaacggttcgttctgcagcgcaagtgtcagaacttcctcgattcgtttcaccggatggatatccaaatcggcgataacgttatccggaatttcttcaaggtcgcgtttgttctcatcaggaatcagaacagtcttaatgccgccgcgatgagccgccagcagtttttccttcagaccgccgatcggcagcacctgaccacgcagagtgatttcaccggtcatcgccacatcagcgcgtaccgggttaccggtcaggcaggagaccagcgccgtgcacatggcaatacccgcgctcggaccatccttaggcgtcgccccttccggcacgtgcacgtgaatgtcacgcttctcgtagaagtcggcgttaatgcccagcttgtcagcccgcgaacgtaccaccgtcagcgcagcctgaatcgactcctgcatcacctcgcccagcgagccggtgtaggtcagcttgcctttgcccggcacgcaggcggtttcgatggtcagcagatcgccgcccacttccgtccacgccagaccggtcacctgaccgacgcggttctcactatcggcgcggccatagtcgaagcgctgtacgccgagataatcatgcagattctcaccgttaatttcgatgtgtttcagcgatttatccagcagcagttgcttaacggccttgcggcacagcttggagatttcacgctccaggctacgtacccccgcttcccgcgtgtagtaacgaataatgccgataatggcgctatcgtcgacggtcagctcgcctttcttcagcgcgttacgttcgatctgcttcggcagcagatgacgtttggcgatgttcagcttttcatcttcggtatagccggagagacgaatcacttccatacggtccaacagcggcgccggaatgttcatggagttggaagtcgccacgaacatcacgtcgctgagatcgtaatccacttccaggtagtggtcgttaaaggccacgttctgttccggatccagcacctcaagcaacgcggaagccgggtcgccgcgcatgtcggaagacattttgtcgatctcgtccaacaggaacagcgggtttttgacccccactttcgccattttctggatcagtttgcccggcatcgagccaatgtaggtccgacgatgaccgcggatttccgcttcatcgcgcacgccgccaagcgccatacgaacgtatttccgtccggtcgctttggcgatggattgacccagcgaggttttacctacccccggcggtcccaccagacaaaggattggccccttgattttgttcacccggctctgcaccgcgagatattcaaggatgcgatccttcacgcgctccaggccatagtgatcggtatcgaggatctcctgggcctgacgcaggtcttttttgaccttactgcgcgcattccacggcacctgcaccatccagtcgatgtagccacgcacgacggtcgcttccgctgacatcggcgacatcatcttcagcttctgcagttccgcttcggttttttctttcgcctctttcggcattttcgccgcgtcgatcttacgcttcagcgcttcgttttcgtccggggcgtcgtccatctcgccgagttctttctgaatcgctttcatttgctcgttcagatagtactcgcgctgagatttctccatctgctttttgacgcggttgcgaatgcgcttctcaacctgcagcagatcgatttccgattccatcatcgccatcagatattccagacgttcgttaacgtcggacatctcaagcacagactgcttgtcagccagcttcagcggcatgtgcgccgcgatggtatccgccaggcgcgccggatcgtcgatgctgttcagcgacgtcagcacttccggtgggatcttcttgttcagcttgatatagccttcaaactggctgatagcggtgcgaaccagcacttcctgctcgcgttcgtcaatcgccggcgagtcgagatactccgctttcgccgagaaatgctcgccattatcagacagcgcagaaatgcgagcacgctgcagcccttcgaccagcaccttcacggtgccgtccggcagcttcagcatctgcaaaatagacgccacggttccaacggtgaaaagatcgtttacacccggctcatccgtcgacgcttctttctgcgcaaccagcatgatttttttatcatggtccatggccgcttcgaggcaacggatagatttttcccgccctacgaacaggggtatgaccatgtgcggataaaccaccacatcgcgcaatggcaatacggggatttcaatgcgttcagaacgctcaggattcatagagctctctcttagtttaaagtccgccaggtagccgacgacgccacactccactgcatcgtcgttaatatgtaatccagtatatggggatgtattccacacattcaacggcgggaatgcaggaaaaataaaaggggagataaaatcccccctttttgttaactgcttgagtgaaatggttaattattcaccagatgcctgctgagcttccggtttgccgtagatcagcagcggtttgctctgaccggcgataaccgactcatcaatgaccactttttcgacatcttccatcgaaggcaggtcatacatggtatccagcagcgccgcttccacaattgagcgcaggccacgggcgccggttttacgcgccatcgctttcttggcgatggcgtccagcgcttcgtcgcggaattcgagctctgcgccttcaaggctaaacagcgcctgatactgcttggtcagggcgtttttcggctctttcaggatctggatcagggcttcttcgctcagctcgttcagggtcgccactaccggcagacggccgatgaactccgggatcagaccaaacttgatcagatcttccggctcgacctgagccagcagttccccttcgctcgctttgtcggacttcgcttttaccgtcgcgccaaaaccaatgccggagccggtttccacacggtgggaaatcactttgtccaggccagcgaacgcgccgccgcagataaacaggatcttggaggtatcaacctgcaggaactcctgctgcggatgtttacgcccgccctgcggcggaacggcggcaacggtcccttcgataagcttcagcagcgcctgctgcacgccttcgcctgagacgtcgcgcgtaatcgacgggttatcggatttacgcgaaattttgtcgatttcatcgatataaacgatgccgcgctgcgctttctgcacgtcgtaatcgcacttctgcagcagtttctgaatgatattttcgacgtcctcacccacataaccggcttcggtcagggtggtggcgtctgccatggtaaacggcacatccagcaggcgcgccagcgtttccgccagcagcgttttaccggaaccggtcggcccgatcagcaggatgttgcttttacccagctctacgccattgctggtatcgccattgcgcagacgcttgtagtggttgtataccgcgaccgccaacaccttcttcgcctgttcctgaccgatgacgtagtcatcaaggtggtggcgaatctcgtgcggcgtcggcagcgcgctgcgctcgcggtgcggcgccacttctttaatctcttcgcgaatgatgtcgttacataaatcaacgcattcgtcgcagatatacacggatggcccggcgatcagcttacgcacttcatgctggcttttgccgcaaaaagagcaatacaacaatttgcccgatccatctttgcgtttatctgtcatgagtccaaacctctttttaagttctttgtgccgcacacgacgacgcaaatgccattctcaggcgcaagccgccatatagcgttgtgccgcccttcattagtatatacacaaaatccttcgcgctacatcgagccggtagcgaagccaccggccgcaagcctgccagacaagcggccgaataaaagccaaccgctcgcgcagacgtggcgagaaggatgaagcgtaaagcggcacccttgcgccttgggcatcaattacgatgggtcaaaatagagtcgaccagcccgtactccacggcttccgcagcagacaggaagcggtcacgctcggtgtcacgctcaatctgctcaagagactggccggtatgatgcgccatcagctcattcatgcgtcctttcaccttcaggatttcacgggcgtggatctcaatatccgtcgcctgtccctgatagccgcccagcggctggtggatcatcacgcgggagttcggcaggcagaagcgcttgcctttcgccccggcggtcagcaggaacgcgcccatagaagcggcctgccccatacagatggtgctgacatccggcttgatgaactgcatggtgtcataaatcgacatcccggcggtgattaccccgcccggagagttaatgtacaggtaaatgtctttttccgggttttccgcttccagaaacagcatctgcgccacgatcaggtttgccatgtggtcttcgacctggccggtcagaaaaatgacgcgttccttaagcagacgggagtagatatcaaaagaacgttcaccgcgtgaggtctgttcaatgaccatcggcaccagggccatatggggtgcaaagttgtctcgttcgccactgtatgacatttccgtctcctggagtaattttaaaatacctgctgcactgattgtaaccttacggacggattatcagccacagtttctatccgctgaatgcgtcaccgcctcttcaatacgcgtgcgattgcggatgcagttgcctcccccggtaatggggatggtgttgccatatttcaagcataacaagcttttgctgtaacgctatcatggttaatgcgttttcgcaccgtgcctgtggctatcattatcttaaaaaaaaacccgccgcctttcggcaacgggtttttgctcgaaccttaaacgatagcggcgaaattacgcctgctggttcatcagttcgttgaaggaagtggctttttcagacactttggctttcgccagcacggcttcaacagcctgctcttccagcgccacgttgcgcatgttgtccatcagctctttgttcttgctgtagaactcaacgacttcagacggatcttcgtacgcagaagccatctcttcgatcagggcttttacgcgctcttcgtcagctttcagctcgttggtgcggatcacttcgcccagcagcagaccaacaacgacgcgacgtttagcctgctcttcgaacagctcgcgcggcagttccagagcctgtttctcattgccgccgaaacgctgagcagcctgacgacgcagcacgtcgatttcgctgtcgatcagggcagccggaacgtcgatctcgttggctttaaccagaccttcgatagcctgagacttcacgcggttacgcacagcgcctttcagctcgcgttccatatttttacgcacttcagcgcgcaggccagcgacggaaccatcttccacgccgaaacgtttgatgaactcttcggtcagctcaggcagttcacgctcttcgactttcttcaggttgataacgaacttagccgctttacctttcaggttttctgcgtggtactcttccgggaaggtcacgtcgatggtgaactcttcacccgctttgtggcctttgataccgtcttcgaagcccgggatcatgcgaccctggcccatcgccagtacgaagtcagaggctttgccgccttcgaactcttcgccgtcaacagaaccggtgaagtcgatggttacgcgatcttcagcgtcaaccgcgccttctttttctttccaggtcgcctgctgcttgcgcagagtttccagcatggtatcaacgtcagcgtcggtgacttcaacaaccggtttttcaacttcgatcgcgtccagaccctgcagttcaacttccggatacacttcgaactctaccgcgtaggtgaagtcttcgcccagtttgtattcgcccggaacgtagttcggcgcgccggccggattgattttttctttgatgatcgcgtcaacgaaatgacggctcatcaggtcgcccagcacgtcctggcgaacggaagcgccatagcgctgagcaacaatattcatcggcactttgcctttacggaagccgtcaatgcgaacttttttcgctacgttgaccagctcgcttttgacagcattctcgatgctgtcagcggcgatagtaatcgttacacggcgcccaaggccctgagtggtttcaactgaaacttgcatcttgttacctcaaaaaaatcacagtgctcggtcaactctggaagcgcgtgtaggtggcttcgcagaaccgggatgccctcttcaaatcagaaacacattccctgtcgtcagaatcatcccgaagacattcatatataagacgcggcattatagcggcatcacttttgtgagtcgagaacggttgtcgcctggtactgcggcatttttcacatttcccgctcaaatttgcccgcaaaagcgctgactttgcgcattttccaggcaaaacaaaacggcccgtaggccgtttttgctaaatctgcaagcaacatactggaaaagcgccagcggttgcaaatgggatttctaagcgatactccctgcgccgcggcacggcggcgaagcaaataccgtatcctgtaatgcttcccattctttaatcgtgtaggtgtgcagcgccagggcatgcaccgtattcgacagctcctcggttagcgtgccgtagatcatacggtggcgattgaggaaacgctcgccagtgaagcgatcgctcactaacaccactttaaaatgactttcagagcccgcagggacgttgtgacgataactttcatccacgacttcgagatacatcgggtcgaacgctgctctaagttttgcttcgatctgttcacgtatcatcatgaattttctcctccgacaacgctgagatgccgccactccatttaaatgttagccgcttttaccgcttccattaggagaaaacaacaaaaaattagcattgttctgatattttcattcaaaagtatcacgtttactggctctggtcgccagatccgtcggggaacgagccattaaccgtggcgggacgctcagaaaaccgccagcacgatggatttacacgcgttgccacttccccttgccgttggcaatgctatgatggcgataattttccttataacaacaccatgcgttgagacctgaacatgcttaagaagattcttttcccgttggtcgccatgtttatgctggcaggatgcgccacgccgccgaccaccattgaagtatcgccgaaaatcacgctgccgcagcaggatccaagcctgatgggcgtgaccgtcagcatcaacggcgccgatcagcgtccggaccaggcgctggcgaaagtgacgcgtgacaatcagctggtcactctcaccgcctcccgcgatctgcgcttcctgctgcaggaagtgctggagaaacagatgacgtctcgcggctacatgattggcccgaacggcgcggtcgatctgcagatcatcgtcaacaaactctatgctgacgtctctcagggtaacgtgcgctataacatcgccaccaaagccgatatcgccatcatcgccaccgcggcaaacggcacgaaaatgaccaaaaactaccgcgccagctactccgttgaaggcgccttccaggcctcgaacaaaaacatcgctgatgccgtcaacagcgtcctgaccgataccatcgccgatatggcgcaggacaccagcatccacgatttcatcaagcaaaacgcgcgttaatgctatcgcgaacccggcctccgccgggttcgtgctttatgctatgtccagtcattacttacgcatttttcagcagccgaaatcagccattttgctgatccttggcttcgcctccggtctgccgctggctctcacctccggtaccctgcaggcctggatgacggtggaaaatatcgatctgaaaacgatcggttttttctcgctcgtcggccaggcctatgtctttaaattcctctggtccccgctgatggaccgctacacgccgccgtttcttgggcgtcgtcgcggctggctgttgaccacccaggtattactcctgctggcgatcgcggcgatgggctttcttgagccggtcacccaattacgctggatggcggcgctggcggtggtgatcgccttctgctcggcgtcgcaggatattgtgttcgacgcctggaaaaccgacgtgttgccagcagaagagcgtggcgccggcgccgcgatcagcgtgctgggctatcgcctggggatgctggtctccggtggactggccctgtggcttgccgaccgctatctcggctggcaggggatgtactggctgatggcggcgctgctggtaccctgtattatcgccacgctgctggcgcccgaaccgagcgacgttatcccggtccccagatcgctcgagcaggcggtagccgaaccgctgcgcgattttttcggccgcaacaacgcctggctgattctgctgctcatcgtcctttataagcttggcgatgcgtttgccatgagcctgaccaccaccttcctgatccgcggcgtgggatttgacgctggcgaagtgggaatggtgaacaaaaccttaggcctgttcgccaccattctcggcgccctgtacggaggcgtcctgatgcagcggctgacgctgtttcgcgcactgctcattttcggtttgctgcagggggtctctaacgccggctactggctgctgtcgattaccgataagcacctctattccatggcgaccgcggtattctttgaaaacctgtgcgggggaatggggacggcggcatttgtcgcgctgctgatgacgctatgtaataagtcgttctccgccacccagttcgcgctgctctcggcgctctctgcggtcggtcgcgtatacgttgggccgattgccggctggtttgtcgaggctcacggctggtcgaccttctatctcttctctgtcgttgcggcggtgccggggattgccctattgctgctgtgtcggcaaacgcttgagcatacccaacgcaccgcaagctttatgccgcgtagcgagttcccgcaggcctatgcgctggcgctggggatcctgacactgggctgcctgctgctcgcggtgtggctggcgctgctgatcctcaacgcgctggattatacgtcgttctccttcctgtccggcctgctggaggttgccgcgctcaccgccgtcggcggaattttgttcggcggcctgcttgactatctggcgctgcgtaaaacccgcctgatttaaggatccagcatcattattagccgttgtaattacgaaacgtaattataacggcttattaacgcttttatattgtccgccgcgctatttgttgttttgtgcgtttttgatttctggaaattattgacagttttcgttcgattctttaaataatttaaccgattcagctccggggattttatttttcgttttcacaatgtcttttatttgataattaaatgttaaacaattgttctaatttgtgggtggttatgcccattagccgctaagcactccttttcttatccctttcgttatcaatcccgcgaaaatcaggctttgcaagcgattaagtaacactacgttacatatgtgacaaaccaagcagaagccgctaacacagaactgacagagatccaatcatgtttacagtaatgcaaccttaccgtaaaatgcccatacactttaaacgccaccagatcccgtggaattgaggtcgttcaatgagactcaggaaatacaataaaagtttgggatggatgtcattaatcgcaggtactgtattactcagtggttgtgattctgcactccttgacccaaaaggacagattggactggagcaacgctctttgattctgacggccttcggcctgatgatgattgtcgttattcccgccgtcttgatggcagtaggatttgcctggaagtatcgcgcgagcaataaagatgcgaagtatagcccgaactggtcacactccaacaaagtggaagctgtggtctggacggtacctattctgatcatcctgttcctggccgttctgacctggaaaaccactcacgcactggagccaagcaaaccgcttgtccatgacgagaagccaatcaccatcgaagtcgtatcgatggactggaaatggttctttatctatccggaacagggtattgctaccgttaacgaaatcgccttcccggcgaacgtaccggtacacttcaaagtgacctctaactcggtgatgaactcgttctttattccgcgcttaggtagccagatttatgcaatggccggtatgcagactcagctgcacctcattgctgacgaagctggtacttatgacggtatctccgctagctacagtggcccgggcttctcaggtatgaagttcaaagcgattgccaccccggatcgggcgactttcgatcagtgggttgcaaaagccaaacagtctccgaactccatggactccatggccgcgttcgagaaagtggctgtgcctagcgaatacaacaaagtggaatatttctctaacgtgaaaccggatctgttcaaagatgttgtgaacaaattcatgtctcacgagagcatgaacatgtctaaacctgaaggcgagcacgctgctcacgacgggatggaaggcatggacatgagccacgcggaaaccgctcactaaggggccgaggaagaaaacgatgttcggaaaacttacactggatgcagtgccctaccacgaacctattatcgtggtaacggtggctgcgattatcattgggggactggcgcttctggcagccatcacttacttcggtaagtggtcctacctatggaacgagtggctgacttctgtcgaccacaaacgtctcggtatcatgtacgttatcgtggcaatcgtcatgctgctgcgtggctttgctgacgccatcatgatgcgtagccagcaggtgctggcttcggccggggaagccggcttcctgccgcctcatcactacgatcagatctttaccgcccacggcgttatcatgatcttcttcgtggcgatgccgtttgttatcggtctgatgaacctggtggttccgcttcagctcggcgcgcgcgacgtagccttcccgttcctcaacaacctgagcttctggttcaccgttgtgggcgtgattctggttaacctgtctctgggcgttggtgagttcgcgcagaccggttggctggcctatccgccgctgtcgggaattgagtacagtcctggcgtaggggttgattactggatttgggcgctgcagctctccggtatcggtactaccctgaccggtattaacttcttcgtgaccattatcaagatgcgcgccccgggcatgaccatgttcaagatgccagtattctcctgggcatctctgtgcgctaacatcctgattatcgcctcgttcccaattctgaccgtcaccatcgcgctgctgaccctggatcgttacctgggcacccatttctttaccaacgatatgggtggcaacatgatgatgtacatcaacctgatttgggcctggggtcacccggaagtgtacatcctggttctgccggtgttcggggtcttctccgaaatcgccgcgaccttctcgcgtaagcgtctgttcggttacacctctctggtatgggcaaccgtctgtattaccgttctgtcgttcatcgtttggctgcaccacttcttcaccatgggtgctggcgcgaacgtaaacgccttcttcggtattactaccatgattatcgcgatcccgaccggggttaagatcttcaactggctgttcaccatgtatcagggtcgcatcgtcttcaactcggcgatgatgtggactatcggctttatcgtgaccttctccgtaggtgggatgaccggcgtgctgctggcggtaccgggcgcggacttcgttctgcacaacagcctgttcctgattgcgcacttccataacgttatcatcggcggcgtagtgttcggttgcttcgcaggtctgacctactggtggccgaaagcctttggcttcaccctgaacgaaacctggggcaaacgcgctttctggttctggatcatcggcttcttcgtggcgtttatgccgctgtacgtgctgggcttcatgggtatgacccgtcgtctgagccagcagatcgatccgcagttccacccgatgctggttattgcagcttgcggtgcggcgctgatcgcctgcggtattctgtgccagctgattcagttctacgtgtctattcgcgaccgcgatcagaaccgtgacctgaccggtgacccgtggggtggccgtacgctggagtgggcaacctcttctccaccgccgttctacaacttcgctatcgttcctcaggttcacgaacgtgatgccttctgggaaatgaaagagaaaggtgaagcgtacaaacagcctgctcactatgaagaaattcatatgccgaaaaacagcggcgccggcatcgtgattgccgccttcgctacggtatttggtttcgccatgatctggcatatctggtggatggcgatcgccagcttcatcggcatcgtagcgacctggattattaagagctttgacgaggacgtggattactacgtaccggttgcagaagtcgaaaaactggaaaaacagcatttcgatgagattaacaaagcagggctgaaaaatggcaactgatactcttgcgcatactgcccacgcgcatgaacacgggcaccatgatacaggaccgatgaaggtattcggtttctggatctacctgatgagcgactgcattatcttcgctacgctgtttgctacctatgccgttctggtgaacggcacggccggcggaccgacgggcaaagatatttttgaactgccgttcgttctggttgaaaccgcactgctgctgttcagctccatcacctacggcatggcggctatcgccatgtacaaaaacaacaaaagccaggtggtttcctggctggcgttgacctggttgtttggcgccggattcatcgggatggaaatctatgaattccatcacctgatcatggaaggctttggtccggatcgtagtggcttcctgtccgcgttcttcgcgctggtcggcacccacggtctgcacgtgacctccggtcttatctggatggcggtgctgatgttccaggtttcacgtcgtggcctgaccagcactaaccgcacgcgtatcctgtgcctgagcctgttctggcacttcctggacgtcgtgtggatctgcgtgttctcggttgtctatctgatgggggcgatgtaatgagtcattctaccgatcatagcggcgcttctcacggcagcgtgaagagctacatgacaggatttatcctgtccatcatcctgacggtcattccgttcgccatggtgatgagtggctccgcctcgcatgcggttatccttggcaccattctggtgaccgctgtggtgcagatcgtggtacacctcgtgtacttcctgcatatgaacagcaagtccgatgaaggttggaacctgaccgcatttatcttcaccgtaatcatcattgcgatcgtggttgtcggctccatctggattatgtggaacctgaactacaacatgatgatgcactaagagcggcgagtatgtttaagcaatacctgcaagtaacgaaaccaggcattatttttggcaacctgatctccgtgatcggcggtttcctgctggcctccaaaggccacatcgactatccgctgttcgtctggacgctccttggagtatccctggtggtcgcctcgggttgtgtattcaacaactacatcgaccgggacatcgatcgtaagatggaacggacgaaaaaccgggtgctggtcaaagggctgatctcgccagaagcttcgctggtgtacgccaccttgctgggtattgctggcttcatgctgctgtggttcggcgctaacccgctggcctgctggctgggggtgatggggttcgtggtttatgtcggcgtctacagcctgtacatgaaacgccactccgtctacggcacgctgattggctcactctccggcgctgcgccgccggtgattggctactgcgcggtcaccggtgatttcgacagcggtgcggcgatcctgctggctatctttagcctgtggcagatgcctcactcctacgccatcgcgattttccgctttaaggattatcaggcggcgaatattccggtgctgccggtggtgaaaggcatttcggtcgccaaaaaccatattacgctgtacatcgtcgcctttgccgtggcaaccctgatgctctcgctgggcggctacgccgggtataaatacctggtcgtggcggcagcggtcagcgtctggtggctgggcatggcgctgcgtggctataaagtggccgatgataaagtctgggcgcgtaagctgttcgtcttttctatcgtcgccatcaccgcgctgtccgtgatgatgtccgttgactttatggtgccggattcacatagtctgctggcttacgtgagataattacgcactcccgtacgatctaaagccccgtatttacggggctttttctttcctgtttcatcatcgctttctttctcatttcatacttccctcccctcccccgtcgctttcccgctatctttcatatcaaaaaatgaggaaaaattgagccagtacgcatcgggcatcactcgcgccgcacggtcctgcgatgctacctttcgccggggctcttgcccctttgggaaataatcactacaaggaattgcaatgaaagagttaacactgaacgaaatggagtatatctccggtggctttaatctgttcggcgcagccagcggcttcgccagctttgtcgccaactctggcgtcggcttcacctcttttgttctgacctccggcaccgcatttgcctccttcgtcggcgacagcgcgatggcgtttggttccttcctgaccggacagtcaaactgggaaacctttgtgaccgccggaaaggaaaactggggaagctttgttaacaccgccggcaacagctggaatactttcgtgaataacgcggccagcgactggaacacctttctgaccaaagcgtcggcctaagcgacgtctatcttagggcagcgccactggctgccctgtttaacccaccagcatcgcctgcgcgctgtagagcagatcgaggtgatcgcggcataacgcttccagcgaagtgcgcgattgatgactggtcagactcagcgccccccaccaggtcccttccctgtcggttaacggcaccgccagcaccagcatgccaatctcaaactcctgctcaatggtggcgtatccctggcgccgtacctgggcgattttctccatcagcgacgcaatatcggtcaccgtatagggggtacgttgttcccgggttatgcgctgcaggacggtctcacactctgcttccggcagcgaagccagccacagtcgccccccggcggtacagaaaatgggcacccgctccccaagccgcaccgacgtagagttgaacggcgtatgccgactgcgggcgatatagaccagttcatcttcatccaccacccccaccgaggcgtgctcttcggtccggctggcgatgtattcgacaatcggccgtaccatgcgaggaaactgcgccgaatcgacataggcctggccaagccgcagcgtctttggggtaagccagtaatagcgcccgtcggtttgcagatagcgctcatgcaggagcgtcagcagaaaacgtcgcgcggcgctttgcgtcaggccgctcattttcgccgtctgggcgacggtgagctttgggcaggttttggaaaaaagctgaattagcgccagccctttttgtaaaccgacgatcagatcgcgtggatgaatggtgttttgcatattcgctcacatttttgcaacatcattatcgatttcctgcgattatcgcagcgttcgtgcgattaacaaccgacatgtccgaattctgcgttgtcgctcccagcttccactgaaatactttcacaacattcatttaacaaatgaggtttgaaatggtcagtggaactacccaggttgtcgccgtgattggtcatccgatcgcccaggtgaaatcaccggataacttcaaccgctactttgccgaacagcacatggacagcgtcatgatcccggtggatatcgccccggacgcggtggccgcctaccttaacgctctgcgcggctggcagaacatgaccggcgtgctggtgacggtgccgcataagcagcgcgccgccgcgctggtcgacgacctcacgccgcgcgcccgccgactcaacgccgtcaatgtgatccgcaagctggcggatggccgcctgcagggcgatatgctggacggcgtcggctttcagctcgccgccgaggcgcagggttttcagccggcaggtaagcaggcgctgctctccggttgcggcggcgtcggcagcgccatcgcctggggactgtgcgaggcggggatccgtcggctggccctgcacgatcaaaccccggccacccggcagcgcctgcatgaccttctggctgaggcctttccggcggtgcaactgagcgcgctgccagacaccctttacggcctcgatctactggttaatggctcaccggccggcatggccggatttgatgagctacctctaccgcaggcgctgctggatacgctcgacagcgccacccacgtggccgacgttgtcaccgccccggtgatgacgccgttgctcactttcgccgccgcccgtggttgcaaagtacagaccgggccggaaatggcgctggcgcagatgaggctgatgggccagtttatcggcgccatcccgcaggcgcagggagcggcggcatgaagagctgggatgtgatcgtcatcggcagcggcgcggccggttttgccgccgcggtcaccgcctgctgtaaagggctgtcggtgctgatgctggagaaagccggccatttcggtggcacctcggccatatccggcggcgccgtgtggctgcacgataccgaccaggcgcgcgccgagggcaaaagcggtagcgccgaggcgatgaaaacctacctgcgaaccattatcggcgagggccagtaccgagaagatcttgccgaagcgtttgtcagcgccgggcgggaggcgctggcctttctcgagcgtgagggggcagtaaagtacagcctgcgtccgctctcgcccgattactatccggatgaacccggcgcagtcgacgtcggtcgtgcgctggaggtggtggagtatgacggccgtgaactgggggacgcgtttcgcgacctgcgttcaccgccgccggggatgctgctgtttggcgggatgatggtcaaccgcgtcgatattcaacattttctcgacatgcgccgctcgctgcgctccctggcccattgcacccggctgctgctgcgctacgcccgcgaccgggtgaagtaccctcgcggtacccgcctggcgatgggcaatgcgctgattgcccgcatggcgactacggcgctgcgtaaaggcatgaacctgcggctgaatgtcaatgttctgacgctgtgcgaagcgcaaggcgcggtccgcggggtggagattgagtatcaggggcaaagagagacgctgcacgcccgccgcggggtggtgctggccgcaggcggcttcgccgcgggcgcgctggcggcgcgctatcggccgcacacccgcgagcatttcaccatgtcgccgccggccaacgatggcgccgcgctgcatctcgcggcggcgcttaacgctcgcgagggagccgatcgggcctccaactttttctgggcgccggtatcggtgctgacccgggccgacggcagcgaggagcgcttcccccatctggtaaccgatcgcgcaaaaccgggcgtgattgccgtcaatcagcgggcggtacgcttcgtcaacgagtccagctcctatcaccatttcgccagcgcaatgcaggatgcagcggaaaatgccccctgttttttactctgcgacgcccaggcgatgaagcgttatggcctcgggctggcgcgcccggcgccggtcaataatgacgccctggtcgccgctggctatctgcacaaagccgataccctggccgcgctggcgcaacagcttggtctggatgcccaaaccctgagcgagacggtagcccgctacaaccgtgacgccgcgcagggcgtagatcgggaatttgctaaaggcggcaacagctataaccgggcgatgggcgatccgggccatcagcctgacgcctgtaatgcccccctgctcagcgcgccgttctatgccatcaaactttataccggcgatctggggacctcacggggcctggtcaccaccgccgatgcccaggtcgtcaatacccaaggaaaccccatcccggggctgtacgcggtgggaaacgacatggattcgctgatggccggcacctatccgggccccggcatcaccctcggcccggggctgacgtttggctatctcgccgcctgccatctggcacaacactccacccactaatcaggaaaacatcatgatctacgaaaaacgcacgtacaccatcaatccgctgaaaatggccgactggctggcgctgtaccaaagcgatgccctggcggtgcaaaccgaccatctcggccagctaatcggcttcttttttaccgagatcggcgtggtcaatcaggtagtgcatatctgggcttatgaaagcctggacgatcgtctggtgcgccgcgcgcggatggcccaggacgaacgctggcagaccttctcgcgcaaaaatcgcgaactggccgccgtggaacgcctcgagtcggtgctgatgcgccccaccgctttttcacctctgcagtaaggagtccaacatgagcgggcctgtgaaggtggatgtgctggtggtcggctccggcgccgcggggctctctgccgcggtgactgcggcgatgcacggcgccagcgtcatggtggcggagaaagcgtcagtgctcggcggaaccagcgcctggtccggcggctggctgtggatcccccgcaacccgctggcgcgggcggagggcatcgacgaagcagccgacgcgccgctgacctatctgcagcatgagatggggggcgaagccgccgatattcgtctgcaaaccttcctgcgttacgggccggagatggtggaatttttccatcagcggacggcggtgcagtttctctcgggcagcgccatgccggactttcacccgtcgccgggtgcggcgaacggtgggcggtcggtcaccgcgcaaccctacgatggccgcctgctcggcgactggctccatcgcctgcgtccgccgctggaaaccattagcctgggcgggatgggcatcgccggcggcgcggatatggcgcattttttcaatgccacccgctcgccgcgctccgcgctgtatgctgcccgccgcctgctgcgccacggctggcagcggctacgcgccggacgggggcagcatctggtcaatggcaatgcgctggtcgcccgtctgctgcgatccgccctcgacgccggcgtgcgttttcagctcaatgccccggtggtccggctgctgcagggtccgccgggcgtgtccggcgcggtgctgcgcagcgacggcggggagattcacgtcgaagctggcgccgtggtgctggcctgcggcggttttccccacgatcgccagcggctggcgcaggtggtgccccacgcggcggagggttacggccatttctccgccgcaccgccggacaatcagggcgaggggatcaggcttggcgaatccgtcggcggccagttcgacacttccctgcgccacccgctggcctgggcgccggtgtcccgcgtcactctggccagcggccagcagctaatgtttcctcatctggtggagcgcgccaaacccggggtgatcgccgtcctgcccaacggcaaacgttttgttaacgaggccgactcttatcatgactttatcgccgccctgctggcggccacacccgcgggcgacacgccgcaggcctggctgctggccgatcgtcgcgcgctgcgtcgctacggcctgggccacgccagaccgttcccgttcacccccaccgcctggctgcgtaccggctatctgcagcgaggaaacaccctggcggagctggcgaagcagtgcgctatcgacgccaatgcgctggcggaaaccgttgaacgctttaaccacttcgccagcgctggcgaagacgtcgattttcaccgcggggcatcagcctataaccgcgcccagggtgaccatcaggtgacgctcggaccgctgcgcgaagggccgttctacgcggtgcgcattctgcccggctcgctgggcaccttcagcggattgcaaaccgacgaacacgcccgggtgctggatgaacagcagctgccgataccgggcctgtacgccatcggcaacgacatgtcgagcgtgatgcgcggctattaccccagcggagggatcaccctcgggcccgccatgaccttcggctatctggtgggtaaaggcctgacaaaaaaacaaatataaacaataacataacttgatttccacgaatggatgcaccctaactctcttcacctgcaactgtaccggagccctttatgaacaagcgtaccctatcgctcgccgcgctgaccctgctcgatgtccctccccccgaacaggtgcggattgcggccagaaccggttttacccacgttgggctgcgactgctccccgccacaccgaccgacccggactacgacatgctgggcgataccccggccgtccgggcgacgctcgccgcgttgatggaaactggcatccgcgtgtcggacgtggagatcgtccgcctgacccccgggtttaccctcgacgatcggctgcagcgttttatggagaccgccgcgcgtcttggcgccggacaggtgttagtcgccggcaatgatgacaaccttcagcgcagcgctgacaacctcgccatcctcgccgcggccggtcgtccatttgggctgaccatgaatcttgagccgatgccctggactcagttgcgcaacatcgccgcagcgcaagcactaatcgccgccagcgggcgggaagacatcggcattctggtggacgctctccatttctggcgcgcgggagaatcgctcgccgccctctccagcctgcccgcgcatcatctcaactatatgcaactctgcgatggcgcggcgcagaggccggagagcgagcaggaacttatccgccaggcccgctcggcgcgcaacgtgccgggggaaggcggtctggatctgcatggtctgatgtcggccctgccggcgacgctgccggtctctctcgaagtgccgcttgacggcgagcaaggcgccctgccgcctcttcagcgggcgcagttactgttcgatgccgcgcagccctacctgcgcgcctgcgcataaggaatacgctatgacacagactcaacgcctggatgtcagagagttaataaatcgtaacccgctgagccgatttcagaagctgattatatttctcggcttttgcgtcatcgctctcgatggttttgatatcgcgatcatgggctttatcgccccgacgctaaagctggaatggggggtaagcaaccaccagctgggtctggtgatcagcgccgcgctgatcggcctcgcgctgggggcgattttctccggcccgctcgccgactggctgggacgtaagaaaatcatcatcaacagcgttttcttcttcggtttctggaccatcgccaccgccttctcgcacaacgtagaacagatgatgttctttcgctttatgactggcctcgggctgggcgccgcgatgccgaatatcgggacgctggtgtcggaatacgccccggaacgccagcgttcatttattatcaccgtcatcttttgcggcttcaccttcggcgcggcggcgggaggattttcggcatcgtggctgatcccccagtttggctggcactcgctgatggcgctcggcggtattctgccgctgctgtttgcccccctgctcatctggctgctgccggaatcggttcgttttctggtgatcaaacaagcgcccgcggcgcgcatacgcgccattcttaaccgtctctatcccggacaaatcagcgacaatgtgaggtttatcctaccggcgcagccagcggccggcaacgcgatgcgcattgtcctctcccgccagtacggtttcggctcgctgatgctatggctggtctactttatggggctgttcctggtctatatcctcggcagctggctgccaacgctggttaaagcggtaggaatgaccgttagccaggcggccatcatgacggcgatctaccaggcgggcggcaccctcggctcgttgtttgccggctggctgatggacaggatcaatccccatcgcgcgctggggataatctacgccgttggcggcctgttcaccatggcgatgggctacgccgcgggcagctttgccttgctctgtatgctggcgtttatcagcggcgcctgcctgaacggcgccaataccggcatgaacgccctctccgcccgctactaccctacgcaggcgcgggcgacgggatccagctggatgcacggcgtcgggcgcatcggcgccattctcagcgcctttgccggcgccgagatgatggcgctcaacctgccctttgaaagcgtctttttgatcctcggtatcccggcagccctcaccgtcgcaggcctggcggcgaagggcatctttgcggccggtcatcctgccgtcgcttcaacttcccccgcgtctgtgcgcggagcgtcatagcggcatctggtccccggtgcaatcggcggattgcaccgtcttcagcagctaataaagaaaatttatttcacattttgttgaaacgaaaaaacgcccgcaacaatctggacgactccggcaggcgatatcccgccctcaccttttcaaccaagcgcaaaagaaactatcgctaattcgatccccctcgcatatatggaaaataaattccacaacataattgaaacagaacaaacatttccttaagttgaagtcagtctatccggatgcgcgttgccgcaggcgtcggcattgagcgcctcagagtgcaaatgatttcaaaaaggagagcaccatgttaaacggcctgaaacccttatcccgttccctgcgctggggcatggtcggcggcgggggaaccagtcagatcggctacagccaccgctgtgcggcactgcgtgacaatgtttataccttgctggccggcgcgcttgacgtcgatgccgagcgcgggcgcgcgttcggtgagcaactgggcatcgcgccggagcgctgctacgccgactaccagaccctgtttcgcgaagaggcgcagcgccctgacgggatcgaggtcgtctcggtcaccaccccgaacaatacccatttcgccatcaccaaagcggcgctggaggcgggactccacgttatctgcgaaaagcccctctgctttaccgccgaagaggcgcgcgagctggtggatctgagcaaaaaacagaacaaaatcgtcggcgtcacctacggctatgccggctatcagatgatccagcaggcgcggcagatgattgccgatggactgctcggcgagatccgcatcgttaacatgcaattcgcccacggcttccataaccaggccgtcgagctgcaggcagaatccacccgctggcgagtaacaccgaagtttgccgggcccagctatgtgcttggggatctggccacccatccgctgtttgtcgccgaaaccatggcgccgcagctcaatatcaaacggctgatgtgctcccgtcagagctttgttccctcccgcgcgccgctggaagataacgcctttgtcctgatggaatatgacaatggcgcggttggctcgatgtggaccagcgcggtcaacagcggcgccatgcactcgcaaaaagtgcgcatcgtcggcgaaaaagcaagcatcgaatggtgggatgagcatcctaaccagctcagctatgaggtgcagggcgagccggcgcgcattctggaacgtgggatgccctacctgtcgccgaacgcgctggcggatgaccgcattggcggcggccatccggaagggctgttcgaagcctgggccaacctctatcgccgctatgcgcaggcgattgacgccacggatcgcgacgatcgcgccttcctgcaagacttctggtatccggacgtcgaagccgggctgcacggcgtctattgggtagagcagtgcgtcaaatcggctgacgctggcagccagtgggttgactttactttaccttaattttccccctcgccagtggagtccccctccactggtttattgatttttaccaacttgtcgcatcgcgcaacagccccgtaatatctgttaaacaaacatttatttacgcttcttaccccccgccgctacactaggcgcagtttttatattgaggtggtaatgaacgataacaaaatgacgccaggggaactgcgcgcgacctggggtttggggacagtattctccctgcgcatgcttggcatgtttatggtcctgccggttctgaccacgtatggcatggcgttgcagggtgccagtgaagcgctgattggcctggcgatcggtatctacggcctggcgcaggcggtgttccagatccccttcggactgttatctgaccgtattggccgtaagccattgatcgtcggcggcctgcttatcttcgtgctcggcagcgtcatcgccgcgctcaccgactccatctggggcatcattcttggccgcgccctgcagggctccggcgccatcgccgccgcggttatggccctgctgtccgatctcacccgcgaacagaaccgcaccaaagcgatggcctttatcggcgtcagcttcggcgtcaccttcgccatcgccatggtgctggggccgattgtcacccaccagctgggtctgcacgcgctgttctggatgatcgccatcctggcgaccgtcggcatcctgctcaccctgtgggtggtgcccaacagccataaccatgtccttaaccgcgaatccgggatggtgaagggctgctttagcaaggtgctggcggagccgcgcctgctgaagcttaactttggtatcatgtgcctgcacattatgctgatgtccacttttgtcgccctgcccggacaactggaggccgccggcttcccggccgccgagcactggaagatttacctggtcaccatggttatctcgttcatctcggtggtgccgtttatcatctacgccgaagtgaagcgcaagatgaagcgcgtcttcctgctctgcgtcgccatcctgctgattgcggaaattgtcctctggggcgccggaggctacttctgggagttggtggcgggcgttcagctcttcttcctggcgtttaacctgctggaagcgctgctgccgtcgctaattagcaaggagtctccggcgggctacaaaggcaccgcgatgggcgtctactccaccagccagtttctcggcgtggcgattggcggcgcgcttggcggctgggtcgatggtttctttgattcgcaaaccgtgtttctgctgggcgccctgctggcgatgctgtggctgctggtggccagcaccatgagcgagccgccgtacgtcagcagcctgcgggtggaggtgccggacggcgtggtggtcgacagcgcgctgcaggcgcgtctgctgagcgccagcggggttcatcaggcgctggtggtacccgaggagcgttcggtgtatatcaaaatcgacagcaaggtcaccaaccgcttcgagatagagcagctcatcaaaggagtataaaaaaagcggggaattccccgctttttgctgtctgcccgccgccttagtcgcggaagtttttgaactggaacggctgtcccagatcgccaccgcgcaccagcgccatcaccgactgcagatcgtcgcgggacttaccggtcacgcggatctcttcaccctgaatctgggcctgcactttcagcttgctgtctttgatcagtttaacgatcttcttctgcaccgcgctttcaatgccctgcttcagcttcgcttcaacaaaccaggttttaccgctgtgcacgatatcttccggtacgtcgagggaggtgccttcaatgccgcgcttgagcagcttggcgcgcaggatatccagcagctggttcacctggaagtcagactcgctcagcactttaatggtcttgttggcgtcgtttaattcaaaagtggcttcaacgccacgaaaatcaaaacgcgactcgacttcgcggctcgcgttgtccaccgcgttacgggcttcctgaagatcaacttcagagacaatatcgaaagatggcatcttttcctctccttccgtttcttttgcgttgcataatacctgcaacgcggcataactcaacttgttatcccggaagcttagctgattacgcaacgctcgcgctattttccccgtgatgtccgacgatgcgaaaagcgacgagatagactttagccatcagcgcctgggatagcggcagatgaggaggaacaatgaaagtaaccgtactgggatgcggtgcgctgggacaactatggctgaccgcgttgtacaaacagggacatgaagtccagggctggctgcgcgtaccgcagccattctgtagcgtcaacgtcattgaaaccgatggctcagtgttcaacgaatcgctgacggccaacgaccccgattttctcgccagcagcgagctgctgatcgtcaccttaaaggcctggcaggtgtcgaatgcggtaaagcacctggccgggatcctgccggacaccacgccaattgtgctgattcataacggcatgggcaccgtcgaggagctgcgcggcgtgaaacagccgttgctgctggcctccacgacccaggcggctcggcgcgatgggaatgtcatcatccacgttgcccagggcaccacgcatatcggaccggcaaaaagctacgagggggactacagctatctcgcagaagttctgcagagcgtgctgccggatgtcgcctggcataacaatatccactcggccatctggcgcaagctggcggttaactgcgtgattaaccctctgaccgcgctcaaagggtgtaaaaacggcgatctgcgcgactatacgcaggaagttgcggccatttgtcgcgaggtggcggcggtgatggagcgcgaaggtattcatacctcggcggaaaacctgctattttatgtcgaacaggtaattgaaagtacggcagaaaatatctcttccatgctgcaggacgttcgcgcccagcggcatacagagatcgactacatcaccggttttctgctcaaccgcgcccgcgcccacggcgtcgccgtaccggaaaacgcccgcttatttgaattgatcaagcgtaaggagaatgaatatgagcgcgtcggcactgatttgcctcgcccctggtagcgaagagaccgaagcggtcaccactatcgacctgctggtccgcggcggagtaaaggtgaccaccgccagcgtcgccagcgacggcagcctgaccatcgtctgttcgcgcggcgtcaaactgctggcggatgcgccgctggtcgaggtggccgatggtgatttcgatatcatcgtcctcccgggcggtatcaagggcgcagagtgcttccgcgacagcacgctactagtggaaaccgtccgccagtttcatctctctgggcgcattgtggccgccatctgcgccgccccggcgtccgtgctggtaccccataatctgttcccgatcggcaacatgaccggttttccggcgctgaaggaacatatccccgccgagcagtggcaggataaaagagtggtctgggatccgcgggtgaatctgttaaccagccagggtccggggacttcgattgatttcgccctgaaaatgatcgatctgctggtggggcgcgagaaagcgtatgaggtcgcctcacagctggtgatggccgctggcatctataattactacgaagcctgatagccggtccgcgccgcgggctggctccccttttcctgaggagtcgcagcatgtcccggagcgcaaccgattctcgcgatcttgtaatcagccgcctgctcagcgcgcccgccccagccctgtggcgcgcgtgggccgacccggcattactccgaacctggtggtgcccgaagccctggcaaaccgaggttctggcctttgattttcgcgccggcggggcctttcacaccgtgatgcacgggcctgacggtgaacgcaacgataaccccggctgttttcttgaggttatcccgcaacaaaaaatcgtcatgacctcgatgctgacggcggattatcgccccgccgtttcccccttcgcgatgacggccatcatcacctttgccgatgaacaggtcgggtgtcgctatacggctacggtgctgcatgccgatgatgaaacccgcgagcagcatgagcagatgggatttttcgagggctggaatattgtcatcgatcagctcaatgacctggcgctgaccctgcgctaatatactcccctgccaatagtaaaaagaccttccatcagggaaggccttttgcatcataacaacctgttacgggcgatacactttcacgttgctgaagccctgctcgcgcaaataaagcgcctgcagacggctcatcaccccgcgctcgcaccacagcagccaggttttgctctgatcgagatcgccaaatttggtgcttagcttgtagaacggcagggaaacaacctcaaccccctcgaccttcagcggcttgtcttcctgctcgtcgatggagcgaatgtcgaggatcgcgtcgttggcgccaaagccggtcacggtttccacttccaccaccgtctcttccgtctgctgggcgatctcgcggatatcgatattgctcgcctcttccaccactttatcaaggatgctgaaatcgaagtgttcttcttccgcttcgatcttcgccttcaccgccttcacggtcgggctcttggagatcacgccgcaatattccggcatggtgcgggcgaaatcttccgtgccgatctcacgcgccaggtcgatgatgtgctctttatcgtgcgaaatcagcgggcgcaggatcagagtatcggagacattatcgatcaggcgcaggttagtgagggtctgactggagacctggccgagcgcttcgccggtgaccagcgcctgcacgccatagcgttccgcgacttttgacgcggcgcggaccatcatgcgcttgagcacgacgcccatctggccgtcgtccactttttcaaggatttcgccgactactggctcaaagttaatcgccacaaagcgaacgcggtgtgagctgccgaagcggttccacagataatgcgcaacctggcggacgccaatctcatgggcggcgccgccaaggttaaagaagcagtaatgaacgcggcagccgcggcgcatcagcatgtagctggagacgccggagtcaaagccgccggagatcagcgacagcacatcttcctgggtgccgatcgggaaaccgccgatgccttcatagcggcctttcaccagcagcaggcgatcgttttcaatctcgagattgacggtgacgtccgggtcggtcagcttcacgcgcgccgtttcaatatgctgattcaggccgccgccgacgtagcgttccacttcaattgaggtgaattcatgtttgccgcgacgcttcactcgcacgcagaaggttttgccttccagcgcctcgcgccacagcggcagcgtctgctcgaaaatatcgtgcagcgaggtgaacggcacgtcttcgacttccagaatatggtggatgccggggatacgggtcagcgcatcgcgaatagccgggcgctgattttcatctttcgcgcgaacttcgatatgatcccaatgacggacgacggccagcgtctcatcatagtttttgagaacgttacgaatgttcccggttaagattttaatgaagcgcaaccgcacagattggcttttgatggtgatttccgggaacaatttaatgataaacttcatagcgacaatagttcgttggcaagcccgacggggctataagcaaaagttgtaaagcagcgcacaccggtgcctgcatcctgggcgcggagtatatcaccattgcgcgttatttgcttacacgcgtgacttcgttaccatacccggtattgccgtcgcgacataacaagagtctacattcactatgccaaagaaaaatgaggccccggccagctttgaaactgctctgggcgaactggagcagatcgttaaccgtctggaaagcggcgatttgccgttagaggaagcgctaagcgaatttgagcgcggcgtacagctggcgcgccaggggcaaagtcagctgcagaaggccgaacagcgcgtgcagatcctgctggcggatagtgaagattccccgaccacgccttttacgccggacgctgaataaatggatttcccgcaacaattgcaggcctgtgtggaacaggcaaacgaagcgctgcgccgtttcatcgccccgcagccctttcagaacactccgctggtggaagcgatgcattatggcgcattgttaggcggtaaacgcctgcgtcccttccttgtctacgccaccggcgagatgttcggcgtgtgccgtaccacgctggatgctcctgccgcggcggtcgaatgcattcatgcctactccctgatgcatgatgatttgccggcgatggatgatgacgatctgcgccgcggcctgccgacctgccatattaaatttggcgaagccaacgcaattcttgcgggagatgccctgcaaacgctggcgttctctatactgagtgatgcgccgatggtcgacgttcctgaccgggaccgactggcgatggtttccgaactggcgcaggccagcggcgtggcgggcatgtgcggcggccaggcgctggatctgcaggccgagggacagcaggttgatttacaggcgctggagcgtatccatcgccataaaacgggcgccctgatccgcgccgccgtccggatgggagccctgagcgccggcgaacgcggccgcgctgccctgcccgcgctggatcgctatgcggaaaatatcggtcttgccttccaggtccaggatgacattctcgacgtggtaggggatactgcgacccttggcaaacgtcagggtgccgaccagcaattgggtaaaagcacctatcccgccctcctgggtcttgagcaagcccggaagaaagcgcacgacctgatcgctgatgcccgccggtcgttagatgagctggccgcacaatctctggatacttcggcactggaagcgctcgcgaattacattattcagcgcgataaataaacaaaaaatgagtctctgatgagttttgatattgccaaatacccgaccctggcgctggtagactccacccaggagttgcgcctgttgccaaaagagagcctgccgaagctatgtgatgagctgcggcgctatctactggacagcgtcagccgttccagcggtcactttgcctctggcctcggcacggtggaactgaccgtggcgctgcactacgtgtataacaccccgttcgatcgcctgatctgggacgtcggccatcaggcctacccgcataaaattctgaccggtcgccgggacaaaatcggcaccattcgtcagaaaggcggcctgcatcccttcccgtggcgcggtgaaagcgagtatgacgtgctgagcgtcggtcactcctccacttccatttccgcgggtatcggggtggctatcgccgccgcgaaagaggataagcagcggcgcgcggtgtgcgtcattggcgacggggcgatcaccgccggcatggcgtttgaggcgatgaaccacgccggggatatcaaacccgacctgctggtggtgctgaatgacaatgaaatgtcgatttccgagaacgtcggcgcgctgaacaatcatctggcgcagctgctctccggtaagctctactccaccctgcgcgaagggggcaaaaaggtcttctccggggtgccgccgattaaagagctgcttaagcgtaccgaagagcatatcaaagggatggtggtgccgggcacgctgtttgaagagctgggctttaactacattggcccggtggatggccatgacgtgctcggtctggtcagcacgctgaagaacatgcgcgacctgaaaggcccgcagttcctgcatattatgaccaaaaaaggccgcggctatgagcccgccgagaaagacccgatcaccttccatgcggtgccaaaattcgaccataccagcggcgtactgcccaaaagcagcggcggcctcccttcctactcgaaaatcttcggcgactggctgtgtgaaacggcggccaaagacaacaagctgatggcgatcacgccggcgatgcgcgaaggttcagggatggtggagttttcgaagaaattccccgatcggtactttgacgtcgccattgccgagcagcatgcggtcaccttcgccgccgggctggcgattggcgactacaagccggtggtggcgatctactccaccttcctgcagcgagcctacgatcaggtgatccatgatgtggctatccagaagctgccggtgctgtttgctatcgaccgcgccgggatcgtcggcgcagacggccagacgcatcagggagcgttcgatctctccttcctgcgctgtattccggatatggtggtaatgaccccgagcgatgaaaatgaatgtcgccagatgctgtacaccggctaccactacagcgacggcccctgcgcggtgcgctatccgcgcggtagcggcaccggcgcgacgctcgagccgctggcatcgctgccgatcggcaaaggggtggtgaaacgtcagggcgagaaaatagcgatcctcaactttggcaccctgctgccggaagccgcggcggtagcggacaaactcaacgccaccctggtggatatgcgttttgtgaagccgctggataccgcgctgatcctccagctggccggcgagcacgactcgctggtgacgctggaagagaacgccatcatgggcggcgccggcagcggcgtgaacgaagtgctgatggcccaccgccgggcagtaccggtgctcaatattggcctgccggattattttattcctcagggcactcaggaagagatccgcgccgacctcggcctcgatgccgccggtattgaagccaaaatccgcgactggctggcataattgccccttccgctcctgctatgcttaagggatacccttgatgaatagcaggagcgcactatgcactatatccccctcggtgatactgccttacgtgtttcccgactctgcctcggctgcatgaccttcggcgagccggaccgcggcagacacgcctggacgcttccggaagagagcagccgcccgcttatccagcacgccattgaaggcggcatcaacttcttcgataccgcaaatagctactccgacggcagcagcgaagagatcgttggccgcgccctgcgcgactttgcccgccgtgacgaggtggttgtcgccaccaaggtgtatcaccaggtcggcgatctggcggaaggactttcccgggcgcagatcctgcgctccatcgacgacagcctgcgccgtctcgggatggactatgtcgacctgctgcagatccaccgctgggactataccaccccgattgaagagacgctcgaagcgctggacgaggtggtgaaagccggcaaagcgcgctatatcggcgcctcgtccatgcatgcccgacagtttgcccaggcgctggcgctccagcagcagaacggctgggcgcgcttcgttaccatgcaggatcactacaacctgatttaccgggaagaagagaatgagatgctgcccctgtgccaacgtaacggcgtagcggtgatcccatggagtccgctggcgcgcggcaggctaacccgcccctggggtgagaccaccgcccggctggtctcagatgagttcggcaaatcgctgtacagcgccagtgaagaaaacgatgcgcagatcgccgggaatctcgcggacgtggcggaagaactcgacgccagccgcgcccaggtcgctctcgcctggctgttaagcaaacccggcgtcgccgcgccgattatcggcccgtcgcgtcaggaacagctcgatgatctgctgcaggcggtggatttgacgctctccgcggaacagatcgacaagctggaggcgccgtatcagccgcatccggtggtgggatttaagtgacgggcgtggtttccccggcagcgtagcgttgccggggagaggcggttaaagcagaccgatgggccagtgatggccaatgatgtacagcacgccggcggagatcacgccggcgacgatatcatcgaccataatccccattccgccgtggatattgcgatcaaaccagcgaatcggccacggcttccacatatcgaagatacggaaaatcacgaagccggcggccacccactgccagtccatggtcggcagcgccatcagggtgatccacatcccgacgaactcgtcccagacgatgctgccgtggtcatgggtgcccatatctttggccgtgcgatggcacagatagacgccgatacagatgctcatcatcaccaccagcgagtaaagctgccaggggagaaaggtcatcagataccagaacgggatcgccgccagcgagcccatcgtccccggcaccaccgggcttaagccgctgccaaagccggtcgccagcagatgccacggattacgcatactcaggcggctaagcgcctcgtctcgactacgcaaagtgatcgtatccctttaaatcaagcgcgaccggcttaccgtcgcggataaactgcagcccttcgctctccggcgcaatctgtccgatacaggtaaaacgcgcgccaagatggccaagagccacgtccagcgccccgcggttcagctccggtacggtaaagcacaactcgtaatcttccccgccggcgagcgcccagcgcagcgcctgctcagaatcaacctggcgcagcatcgcatcggagtacggcatggcatcgagatcgatacgtgcgccgcagccgctggctttgagaatatggcccagatcggagatcaggccgtcggagagatcgatagccgatgtcgccaggtcacgcagcgcctggccctgcagcacgcgcggcatcggccgcagatgacgggccagcaggtagtcggcgtcagacggttcatccaccgttagacgattctgcagtacagccagaccggcggcgctatctcccggagtgccggtaacatagatccagtcccccggcttcgcgccagcgcgtttcatggcgcgtcccggcggcacaaagccgtggatacccagcgtcatggagagcgggccacgggtagtgtcgccgccaatcagttgcatatcgtaatagtccagctggacaaacaggctgtcgctgaaggcttccagccagacttcatccacctccggcaaggtcagcgccagcgtgagccacgccggctccgcgcccatcgccgcgaggtcgctcaggttcaccgccagcgctttataagcgaggtcggccgggtcgatatcgggtaagaagtgattgcccgccaccagggtgtcggtgctgattgccagcgtttttttctcgggaatatgcaggagcgcgcagtcatcgccgatgccggtttcaacatcaaggcgggcgcttttaacgcgatcaaaataacgggcaatcagggagaattcgccgcatgccatacgttatgcctcagcaaaataataaataaggccgggctgcgaggcgaccctcgcaaaacccggcctgcagtttacttcttgtggggacgaattaccggagccgctttgtccagcacgccgttaacgaacttgtggctatcttcagcgccgaaggttttcgccagttcgatagcttcattgatggccactttatacggtacgtcatcacgtttggacagctcaaacagcgcgatacgcagcaccgctttttcaacctggcccagctcttccagctggcgggacaggtagggcttcatcaggccgtcgaggtacgcgctgttagtcgccactccggacagcagttcgcggaaatacagaacatcaacatcttttacgtcctgttccgccaggaactggtattcgacatcagcgatgtcgttgtgggacaactgccaggagtagagcgcctgaacggcacactcacgggcgcggcgacgagcagcaggtttcacggaattccccttacaaaaatcaggccttgatggctttcaatacgttaatcatttccagcgcggtcagcgcagcttctgcacctttgttaccggctttggtgccagcgcgctcaatggcttgttcaatactttcagtggtcagaacaccaaaggctaccgggatttcgctgtcctgagcgacatgcgccaggccattgctggcaccgcctgccacatattcaaagtgggcggtaccgccgcgaatcaccgtccccagcgcgatcaccgcgtcatatttaccggttttcgccagtgcgccagccgccagcggcagctcatacgcgcctggaacccaaacgacggtgatgttttcatcttttacctgaccaatgcgtttcagggcgtcaatcgcgccttccagcaggctgtcattgataaagttgttgaaacgcgcaatggtgatggcgacgcgagcgtccggggtagcaacgttagcttcaataatgttcatactcttccttcgggttcatgtgccccgcaaggggggcggattttatcatattattctgagcgctgcttcctaataatcaggaaagcctcacgcagtggttaaatgcaggcagacatccgggccaacctgacgtatctcattgaatttaaaatggggggcctggctcagctcttcaagccccggcagcgcgcataatccacgcgccgcattgcctaacagtttaggcgcaatatagacgataagctcgtcgaccagacccgcctgcagcagcgccccggcaagcgtagcccctgcctcaacccagacgctgttgatctgctgtttgccgagcagcatcatcagcagcaccagatcgagatggccgttatgctccggaaccagcagcgtgcgggcgctttccggccactgccgtgcatcggcgcgcaggcgggcaaacagcgtttcccccgcctgctgcacaatacgatgctcaggcgtgacgcggttctggctgtcgataacgacgcgcagcggctggcgcaaattctcttcgggataaagcgcctgggtatcggcgctcagctcctgccagcgcacggtcagcgccggatcgtccgccagcacggtggcgctgctggtcaggatggcatggctctgggcgcgcagacgctgcacgtcgcgtcgcgcctgcggggaggtgatccactggctttcgccgctggccatcgccgtgcggccgtccagcgaggcgcccagcttcagctgcacccagggaaaaccggtgcgcatccgcttcagaaagcccttattcagcgcttccgcttcgttcatcatcagcccatggctgacctcaatgccggcctgctgcaggcgatacaaaccgcgccccgccacctgcgggttcggatcctgcatcgcggcgaccacgcggctgacgccggcggcaatcagcgcatcgcagcatggcggcgtacggccatggtggctgcagggctcaagagtgacgtaggcggtggcgccgcgcgccttttcgccagccatgcgcagggcgtgcacttcagcatgcggctcgccggcgcgatagtgaaacccctcgccgacgatctcgccgtctttcacaatgacgcagccgacgttagggttaggatgggtagtaaagcgaccgcgcgcggcaagcttcagcgcacgcgccatgtacatttcgtcctgcatggcttagtcctgtaagcgggcgatctcttcgccgaattctttaatatcttcgaagctgcgatagaccgacgcgaagcgaatataggcgactttatccagctttttcagctgctccatcaccaggttgccgatcattttgctggccacttcgcgctcgccggtgccgcgcagatgagtcttgatatggttgaccgccatttccacgtcgtcggcgctaaccggacgtttctccagcgctttcagcatcccgctgcgcagcttgtcttcgttgaagggttcgcgcacatcgttactcttcaccacccgcggcatcaccagctccgccacttcgaaggtggtaaagcgttcgttacagaccaggcactgccgacggcgacgcacggaagagccttcccccaccagacgagagtcgatcactttggtatccacggcgaaacagaaagggcaatgcatagcgcgtcctgacaggtagttaaactgaagagtagtttaccgcgaagtgaccggactacaaagaaagagcttttgagacaaaggatctatgggagatgaggccgggttggctaccattaagcatcctctgtaaacggaatcctgaccatgacaagacgttacctgaagctcgccatcgcgggctgcctgttcaccctgaccgcctgcgcccagcaaagcgaaatccgccagatgcaccagagcgtgagtacgctgagccaggagatgacccagctcaaccagcaaacgatcaaaatcacccagcaaaacgcgctgaacgccaaatccacccgcggcgtctatctgctgccggaggccaagaccccggcgcggctggagagccagatcggcaccctgcgcatgtcggtgggcagtattaccccggatggcgatgggtcacgcctgaccttacgcattcagggcgaatccaacgatccgctgccggcctttaccgccaccgtcgcttccggacagatcaccggcaccacccacagctatcaggaagtcaatgttcaggatcagctgattagcgcgccggccagcaccctcgcccccagcgatgtcgatatcccgttgcgcctcaatgtaacgccagataaagtcggttttattcgcgtacacgatatccagcccgccgccgcccagtaagccttcagccgggcctgccccgcccggctacctcctgccccgtctttcttatccacttacaacttttcgcaagagttcattagaaatcgttctgcagcgcgattttcagtagcattttgtcaagaaatgcatagaatcgtgaacgcaatcgattacgcatgttctggttatgtgaaacaacacgtatttttgtgagcaatgattcctataatagacccccacagaaagacgaaatatttagaaacgcttcggcacttcttttaacgccttcaggctcaatttaaacagtggcattactatgaaaaaaacattactggcagcgggtgcggttgtggcgctctccactacttttgccgcgggcgcggcagaaaacgacaaaccgcagtatctgtctgactggtggcaccagagtgttaacgtggtgggcagctaccacacccgttttggaccgcagatccgtaacgatacctacctggaatacgaagcgttcgccaaaaaagactggtttgatttctacggctatattgatgccccggtattcttcggcggcaacagcacggcaaaaggtatctggaacaaaggttccccgctgtttatggagatcgaaccgcgtttctctatcgataagctgaccaataccgacctgagcttcgggcctttcaaagaatggtatttcgccaacaactatatctacgatatgggccgcaacgactcccaggagcagagcacctggtatatgggtctgggtaccgatatcgataccggcctgccaatgagcctgtcgctgaacgtctacgccaagtaccagtggcagaactacggcgcctccaacgaaaacgaatgggacggctatcgcttcaaagtgaaatactttgtgccgctgaccgacctgtggggcggttcgctgagctacatcggcttcaccaacttcgactggggttctgacctcggcgatgacaacttctacgatctgaacgggaagcacgcgcgcaccagcaactctatcgcctccagccacatcctggcgctgaactacgcgcactggcactactctatcgtcgcccgttacttccataacggcggccagtgggctgatgatgcgaagctgaacttcggcgatggtccgttcagcgttcgctcgaccggctggggtggttacttcgtggtcggctacaacttctgattgctgatacagcaagacagcgcccgggccgcagctcctgctgcccgggcttttttatttctcccgcacctcgcaccggaccttgcgcagaaaatcgcttaacgagcggtcggcgcactcgctgaatcgacgttcggtccttctgacctccagacaacggtcgaggcgaaaattgcggtaatcattgcgcagttcgcaccaggccaccaacagccagcgttcgccccagaaaaacagccccaggggcagcacttcacgccacgtcacctgaccggattcatcctggtagtgaagctgtaatacctgctgattggatacggcctggtggataacgtcaaaatgggttttagcatagcgatgcgcgccaaggtcaggggcaaacaggcgagtctgctccgcctggcgccgacgcgcctccggcaggatcgccagcattttttcctgggcggactccagcgactgcgacagcgcctcaccgccccaggtttttagcagccgaatcgcagcgatcatcgcctcggattctttggtggtcagcatcagcggcggcagatcgtagcccgccagcagccggtagccgctgcccgcttcgccctccaccggtacgccggagagggagagatcgcgaatatcgcgatagacagtacgctccgacacgcccaaccgctccgccagcagcgcggcggtagtgagccgcctgccgcgcaggatctgcacaatctgaaataaacggtcggcgcgtcgggtcatgtctcacttcacaaaagttaaggttaagccggctggtgcaggccgacgcggttgccctcgctgtcggtaaacagggcgatggtgccaatatcattcggcagcgtcagcgggccgaagacacaggccccacccgccgaggcaacgcgctccagcgtggcggcaagatgatcagtatgcagataaataatagcgccctgcgccgagggcgcgataccttcaaatttggccagcgcgccgccgggggccggatcctgatgcgggaacaccgccagctcggcgcagtccatggtttcgcgacgcagcgacacttgcatcaccggctcataaaacgcgacggcgcgatccatatcggcgaccggaatttcaaaccagttaatcacgttgttcatacttcctcctgctcgttagtgagttcagaggcagtgtatgggagggctcctgacagcatactgtcagcaggttttgtcgcgggcaaaaaaatcccggccgcaagggccgggatagctttatctcaactgaaccggattacggcagaatagacggctgatccgccccttctttctcaaccttctgctggatcagatgctcgcgcttcatgcccagcttcaacgccagcgcggaggcgacgtagatagaggaagccgtaccgatggaaacaccgatcagcatggtcagcgagaagccttccagaatcgggccgccgaacaggaacagcatcaggatcaccatcaaagtggtaccagaggtgatcaaggtacggtgcagcgtctgggtcaacgacacgttaaagatctcgtacggcgtaccgcggcggatcttacggaagttttcacggatacggtccgataccacgatactgtcgttcagcgagtagccgataaccgacatcaacgaggccacgatggtcaggtcgatctcgatatggaacagcgacagcacgcccatggtgatcaccacgtcgtgcgccagggcgataaccaccccggcggccagacgccattcgaagcggaagccgacgtagatcaggatacagaccagcgccgcaatcagcgccagggcgccggtttgcgcgaggtccgccccgacgctcgggccgacaaactcaatacgcttcactgccgcattctggctggtcgattcgttaatcaccgtcacgaccttgctgcccagctcctggctgccgttggcgtcatgcaccggcggcatacgtaccatgatgtcgcggctgctgccaaagttctgcacctgcggctcttcaaagcccgctttctgcagggaatcgcgcatctggtccagatcgaccggtttctcaagggtaatttcaatcaccgtaccgccggtgaaatcgagcccccagttaaacccgcgaacgccgatgatggcgatcgacacaatcagcagaaaacctgaaatgccgaaggcccagtagtcccagcgcataaagtcccagactttacggccgtggttcaattgttcaacagtatattcctgtgccacaacgcactcctcagatagacagctttttaacgcgcttgccgccgtacagcaggttcacgatggcacgggtgccgacgatagcggtaaacattgaggtcgcgataccgataccggtggtaatcgcaaaccctttaatggcaccggtaccgaccgcgtacaggatgatcactttgataagcgtcgtcacgttggcgtcgaagatcgagctgaacgcgccgcgataaccttcgtcaatcgcctgctgaacggtacgcccgttgctcagctcttctttgatacgctcgttgatcagaacgttagcatcgaccgccaccgcaagggttaacacgatacccgcgatgcccggcatggtcagcgtcgcccccgggatcagggacataatgccgacaatcagtatcaggttggcaatcagcgccgaggtcgcaatcaggccgaacttcttatagaagaggatcatgaacaggatagagaccaccagaccggccagacaggcttccagaccctgcttgatgttctgcattcccagggttgggccgatagtccgctcttcgacgatctgaatcggcgcaatcagcgcgccggcacgcagcagcagcgacagctgacgcgcttcgttcggattgctgataccggtgatacggaagctgttacccagacgcgactggatgttggcgatgttaatcacctcttcctctttcgccaggatagcgcgaccgttagcgtctttcttaccgctgtctttatactccacgaacagggtcgccatcggcttgccgatgttgtccttagtgaagttagacatgatgttaccgcccgcgctgtccagcgagatgttaacctgcggctggttgtactcatccatgctggaggtcgagtcggtgatatggtccccggtcaggatcacccgcttgtacagcactaccggctggccttcacgcgtctgcttcacttccgagtcgcccggcacgcggccagaggcggcggcggactggtccacgttagtattgaccagacggaactcgagggtcgcggtcgcgccaaggatttccttcgcacgcgcggtatcctggatacccggcagctcaaccacgatgcggtcagcgccctgacgctgaaccagcggctcggcgacgcccagctggttcacacggttacgcaggatattaatgttctgctgaaccgcgtactcacgggcttctttcaggcgctcatcggtcatcaccgctttcaggctgttgtcaccctgagaggaaataaccagatcgcgatggcgagggctgagataagagatagcctggtcgcgcgccgcgctgtcgcggaagacgatgctcagaccgtagttgtcttctttacgcacggtcgcgtaaggaatgcctttgtcgcgcagctcgctgcgcaggctatcgatgttctgttcctgcagtttgcctaacgcggtgtccatgtcgacttccatcaggaagtgcacgccgccgcgcagatcaagacccagcttcatcggctcggcatagagcgccgccagccagcgtggggttgccggagcaaggttcagcgccacgacgtatttgtcacccagcacgttaagcagcgcttcgcgcgcgcgcagctgggtatcagtggtgtcgaagcgcgcaagaatagcgccctcttccagtgccacagacttcgcggttattttttcttcttgtaaagttttctggacctggatcagcgtttgctcactggcggcgacgccgcgcgcgccagtgatttgaacagccggatcctcaccatacaggttgggaagcgcatagatcaggccgacgacaatgacgacgaccagcatgacgtacttccacaaaggataacggtttaacacggcagttccctttgggaaaagttagattacagcgccttcatggtgcctttcggcagaacggcagcaacgaagtcacgtttgataaccacttcagtggtatcgttcagcgcgatagcaatgtagccagtttccgctactttggtcacgcgaccgaccagaccgccgttggtcagcacttcatcacctttggcgatggagttcatcaggttcttatgttccttggtgcgcttctgctgtggacgtaggatcatgaagtaaaaaatcagaccgaacaccaccagcatcagaatcagagacatcgggctgccctgcgccggtgcacccgttgccgctaccgcatcagaaataaaaaagctcattgaaattccctcattattaaaattaatcaacgttcaaaggaggcacggtgcgcccctgacgttggtaaaaatcggtcacgaagctctctaatttaccctcttcgatagccttgcgtaaaccagccattaaacgctgatagtagcgcaggttatgaatggtattgagacgcgcgcccaatatttcgttgcaacggtcgaggtgatgcaagtaagcgcgtgaataattgcgacatgtatagcaatcacactcggcgtccagcggcgcggtatcgcttttgtgcttcgcgttgcggattttcaccacgccgtcggtgacgaacaggtggccgttacgcgcgttgcgcgtcggcatgacgcagtcgaacatatcgataccgcgacgtaccccttccaccagatcttccggcttcccgacgcccatcaggtatcgtggtttatcggccgggatctgcgggcagacgtgctccagaatacggtgcatgtcttccttcggctcaccaaccgccaaaccgccgacagcgtagccatcaaagccaatctctaccagacctttcaccgagatatcgcgtaaatcttcgtaaacgctaccctgaataatgccgaacagcgcatttttattgccaaggctatcgaaacggtcgcggctgcgcttcgcccagcgcagagacatctccattgagcgcttggcgtaatcccagtccgccgggtacggcgtacattcgtcgaagatcatcacgatgtcagagccgagatcgtactgaatctccatcgatttttccggatcgaggaaaatcggatcgccgttgatcggattgcggaagtggacgccctgctcggtgatcttacggatatcgccaaggctgaacacctggaaaccgccggagtcggtcaggatcggtcctttccactgcataaaatcgtgcagatcgccgtgcagcttcatgatctcctgacccgggcgcagccacaggtggaaggtgttgccgagaataatctgcgcgccggtggcttccacctcttccggcgtcatccctttgacggtgccgtaggtgccaacgggcataaaggccggtgtttccaccacgccgcgctcaaacaccaggcgaccgcggcgggcgcgaccgtcggtggtatccagttcaaatttcatgcttgctcctgcgtcagaaaaacagtccgacgttttcatactcgccacggaatgattccgtagctaaaaaatgcgttatggcgtctacaagccggcgtaccggccttttcagggacgctcagaaatagcctgcggattgtacgtgataaacatcgcatccccgtagctaaaaaagcgatatttctgctcaaccgccaccttataggcgttcatggtgtgctgataacccgcaaacgccgacaccagcataatcagtgtggattcagggagatggaagttagtcaccagcgcatcgatcacctggtactgataacccgggtagatgaaaatctgcgtatcgtcgaagaacggcgcgatcagcgcgtctttcgccgcctgcgccgcgctctccagcgaacgtaccgaggtggtgcccaccgcgatcacgcggttgccgcgcgctttcgccgccagcaccgcatcgaccacctcctgcggcacttcggcatattcggagtgcatggtgtgctcttcaatgctgtcgacgcgcaccggctggaaggtgcccgcccccacatgcagggtgacaaacgccatctcaacgcctttggcgcgcagtttgtccagcagcggttcgtcgaaatgcaaaccggcggtcggggcggctaccgcgcccggcctggtgccatagacggtttgatagagctcgcggtcggcgtcttcgtccgggcggtcaatatagggcggcagcggcatatggccgatcccgttaaggatctccagcaccgggcgctcgtcgttaaactccacttcaaacagcgcgccgtggcgcgccagcatcgtggccttaatgctctcgtcatcgcccagcagcagctcggcgcccggcttcggcgcttttgaggcgcgaatatgggccaggatgcgcttatcatccagcatccgctccaccagcacttcaatcttgccgccgctggccttgcggccgaacagacgcgccgggatcacccgggtgttgttaaacaccagcagatcgccgggattgagcttatcgaggatgtcggtgaaggtgccatgcgtcagcgcgcccgtcggcccgtccagggagagcaagcgacagctactgcgctcaggcatcggatagtgggcgatcagagattcgggtagttcaaaagcaaaatcggtaacgcgcatgacggtaactcagactgaataaagaggcgggtagtctagtgccggggcggtctggctgcaacctttacccctccggatgaatgacataatctatattccaaatcattccgaatgccgccatgcggcaaccgaatgccttaccggtggcaaaggtgccgcgcgcggcaagacagcatgccattcggccaccgaggcggcgttcagcgcaacatcggtgtttccacctgcccgctcgtatttaaaggatgtcgttttatgaattttctcgcccacctgcacctggcccatctcgccgacagttcgctgcccggcaacctgatggccgacttcgtgcgcggcaacccgcagggcgactatccggcggagatcatcgacggcatctatatgcatcgccggattgacgtgatgactgacaacctggcggaagtcaaagaggcgcgggagtggtttcgcccgcagacccgccgcgtcgcccccatcaccctcgacgtcatgtgggatcatttcctgtcccagcactggacgcagctctcccctgacctgccgctggacgagttcgtacgctacgccgagcggcagatcgtccccatcctgcccgactcgccgccccgcttcgtcaatctcaatcaatatctgtggtcggagcgctggctggagcgctatcgggaaatggattttattcagcgcgtgctgaacggcatggccagccgccgtccacgtctcgaggcgctacgcgactcctggcaggatctggatacccattacgaccgtctggagacgcagttctggcgcttttatccgcagattatgcgcctggcagaaaacaaacagctgtaatagccacgtcattgataggtaaaagctggctgaacgattgttagcgcctctttgtgttattgccgggcaggctctatacttgcccgcgttgcgttccaaataaccttagtaattacaggagaatcaaatggttctggtcactcgtcaagcgccggattttactgcagccgctgtgctgggtaatggtgagatcgttgagaaattcaatttcaaacagcacaccaacggtaaacctaccgttctgttcttctggccgatggacttcaccttcgtgtgcccgtctgagctgatcgcgttcgacaaacgttacgaagaattccagaaacgcggcgtggaagtggttggcgtttccttcgactccgagttcgtgcacaacgcatggcgtaacaccccggtagaccagggcggtatcggcccggttaaatacgcgatggttgctgacatcaaacgtgaaatccagaaagcttacggtattgagcatccggacgaaggcgtagcgctgcgcggctccttcctgatcgacgccaacggcatcgttcgtcatcaggtggttaacgacctgccgctgggccgtaacatcgacgaaatgctgcgtatggttgacgccctgcagttccacgaagagcacggcgaagtctgcccggcgcagtgggaaaaaggaaaagaaggtatggccgcctctccggaaggcgttgcaaaatacctgaccgaaaacgtttccagcctgtaatcggcacgcgttttaataaaaggctcgctcaggcgggccttttttgttagcggcgtcaaaatttaagaaaatgacccgccgatatttgtgaccagcgatacacttctggcgaaaaaattcgccctacctctcactttttctctgccaaatttcagcgtcaaaatacaaagccttcataacagcctgaaaaacttataaattatttatatcgttttctgccggtactttgccgtcgatgtgatccccatcaatatttaaaaccgcggatgtgatctcatccatcattttcatcaatgtatttggtcatgatttaactcaggaacaggaatacgttcaggagctgaggatggaaattatttttgacccgtcgttaatcgcccttaagcagaatatttcccgtgcggaagaggccatcgaactggcgggttcattacttgccaggcgccagatttgcagcgccgaatatgtcaacgagatgctgacggtatatgaagattttggcgccgccatcgtgatagatgacgggattgccatgccgcatgcccggccggaaaaaggggcattacagaccgggttctcacttgtcaccaccgccacgccaatctccttcggccacgatgagttcgatccggtttccgtggtcatcgcgatcgccggcgccgatgctgacagtcatatcaaaatgatccaactgatagcctcgctgatcgagtcagatattgtgacctttcttcagcaggaaaatgacgttaattcagtcttacatttcattcaaaaacaaatggagtagtcattatgttagttatcagaacggtttgtggtaacggtattggcagctcattgatggctgcgaataatgtgaaaaagatctgtgacgaattaggcatcaaagcggacgtcgcctcggtcgattttgctaacgccgtcggggaaaaagccgacctttacgtcacgatcaaagaactagcaaatcaatttccggcccactgtcatgtcgccatcattcgcagctacgtccataaagcgaagatcgccgaggatattaccgatgcgctgatgaaaattgctgcgactcactcttaatcagcatagagggaacgaccatgcaggctattcttagtttcttaacggaaatattcagtcaacccgcctttttaatggggcttatcgcctttgttggtttagtggcgctgcgctcccccggtaacaaactgcttaccggcacattaaagccgattttaggctatttgatgttgagcgctggggcaggcgttatcgttgccaatctcaatccgctgggcggtattatcgaggccggatttaatatccgcggcgttattccgaacaatgaagccattgtctccgtcgcccagaaaatgctgggcgtggaaaccatgagtattttactgttaggctttattttcaatctgattatcgcccgctgtactaagtataaatatatctttctgaccggccatcattcgttctttctcgcctgcctgttctccgccgttctgcaggcggcggagttccagggctggatgttgatcctgatcggtggattcctgttgggctcatggtcggccatctccccggccatcggtcagcgttacaccaggcaggtaaccgaagacggcgggatcgccatgggccatttcggctctctcggctactacctctcggcatggatcgccagccggaccggcaatccggcaaattccttcgccgataccgaaatttcagaaaagtggggctttctgcgcgataccacggtcaccaccggtatcgtgatgtttgttatctactttgtctgcagcgctgtcgccgggtcggcgtacctgagcaccatcaccgaccaaaacatgctgatcttctcggtgctgaccggtctgcagttcgccgttggcgtagccattgtctataacggcgtgcggctgatcctcggcgatctggtgccggcgttccagggcatcagccagaagctgatcccggactccatcccggccgttgactgcgcggtgttcttcacctttagccccaccgcggtggtggtgggattcatcagctcctttgtgggcgggctggtcgggatgctcttgctcggcgggctgggcatggcgctgattattcccggcatggtcccgcacttcttctgcggcggcacgtccggcgtcttcgccgacaaactgggcggtaagcgcggatgtatcatcgcctcctttatcggcgggatcttcctcgccttcctgccggcgatgctgctgccggcgctcggcaacctcgggtttgaaaacagcaccttcgccgatttcgacttcgcggtatggggcatcattatcgggaatgcgttcacccagtttggtcagatcactatctatctgatttgtctggcgctgctcgtcgcgctgctggcgcctttctgcttccgtcacgtccaggtggtgggcaacacgctcagctatgaggagctgacggcgaggcagaaaaatgaataagcgaggtcatttttcccggcgggagggccacgctttccgccgctgacaaataatcaggagtggttatggctattttgtccattggatttgcttgtttcgatcagtttttctttctcaatgaatggccccaggagaataccaaaaacttttgtcatgattttattgaaagcggcggcggtccggcggccaatgcggcctggctgctgggattatggggcgaggaggtttattacattggtcatctgcagcaggacctttacggtcagcgcattatcgatgagtttgccgaggcgggggtggataccagccaggtggttttctccgatgacatgatcaccccgctggcctcggtgctggtcaatcgcttaacgggttcgcggacgattattacccgcaagatgcaaacgccgccttccctgacctacgagcaaaagctcaaactggacgacctcgccgagcgactgattgccagcgaggagccggtcaccattttaattgacggccatgaggcggaaatcagtgaatatttaattaagaaactgcccaacgccagggtcgtgatggacggcgggtcactgcgcgccagcaatattaaactggcggcctggactgactattttgtagtgagcgaacatttcgcccgcgattatatgagctatcgctcgctgagcaccgaagcagaaattaaagcggccctgattgagttgaataaaatttgccgcggtgaagcatttattacccttggcgaaaaaggctgcgcttttttaaaaagcggtatgctgcagatcgtcccgtcctggctgtgcaatgccgttgataccaccggcgccggggatgtatttcacggcgccttcacctatggcgtccattactcatggcatatcgataacattattttatttgccagcctgaccgccgccatttctattgagaaaaaaggggttcgggaatcgatgccggacctggcggtcgtccaccactcgttaaatagctacgagagaaacttaacgcaatattttgaagaataactgcatttaataaatatcaagaggtgaatatgttagtgtcgatgaaggacatgcttcagcatgccctgcgggacggctacgccgtcggtcagttcaacattaataatctggaatgggtcggcgccgtattaagcaccgcccagcagtgccgctcaccggttattttgggggtgtccggcggcacggttaagcatatgctcgggttaaaatgtattcatgacattgtggttaacgccatggagtatttgcatattgatgttccggtggcgctgcatctggatcatggcacctcccgggaggcctgcgaagcggcgatcgccgccggcttcagttccattatgtttgatggctcgcatctgccgttcagggaaaacctggccattacccgccacctggtgacgctggcccacagcaaaggtatctctgtggaggccgaactggggaccatcgccggcagtgaagacggcattgtcaattccgaagtcatctacgccgatccgcaggagtgctacaccctggtgacagaaacccaggtggattgcctcgccgccgcgctgggctccacccatggtctgtataaaggtaaagcccggctgggatttaccgagatgaaagccattgccgagcaggtgaaggttccgctggtgctgcatggcggcaccggtattgccgatgaggatatgcgccgggcgattgcctgcggcaccgccaagattaacgttaataccgaaaatatgtacgcctggtgccaacaggtgaaagcaattttcgccgccgacaccgggcacgatgtgaacgatccgcggaaagtcatcgcccagggactgcagccggtacgcgagatgattgcccgccgcatggcgctctttggctcagagcagcgctattgacgccgggcctgcggctgaaaccgccgccccgacgctgccggggcggtggcgtcaggtatcaaaaggcaaagcaggagcagcccagcacgccccagaaggcctgctcgtcagagaccggaatcgacgacttacgcgcaatatcatgctgatggccgtggacgccacagctaccgcagcactggtgcatctgcaccatggcgccgattttagccgtcgccggcggagcgaaacggtaatggcccgggaccttcaccaccggcgaccactccggcagcaccgggatcggcggcggcgccagcggcgagaagtgaccggcggcatagaccactttgccgtcaaccaccgtcagcaccgactcaatgcctttgatctcctcttccgcgacgctgaagtagtctttcgacagcaccaccagatcggcaagctgaccggcggccagacggcctttcttgccctgctcgctggagaaccaggcgctgcccgccgtccacagctccagcgcgacatcgcgcggcaggcggttggcgtcgtcatacatcgccatcccgccaacggtgcgcccggagaccagccagtacagcgcggtccatgggttatagctggcgacgcgggtcgcatcggtgcccagccccaccggcacgtccagcgccagcatctttgctaccggcggggtatgtttcaccgcctctttgccgtagcgatcgacaaaatattcgccctggaaggccatccgatgctgcaccgcaataccgccccccagcgccttcacccgctcaatgttacgctcggtaatggtctcggcatgatcgaagaaccagtgcaggccattaaacgggatatcgcggttcaccttctcaaacacgtccagcatccggctgatggactcatcgtaggtggcatgcaggcggaacggccagcgatgctccaccagatggcgtaccacccgctccagctcatcctccatgccttgcggcagatccggccgcggctgcaggaaatcttcaaaatccgccgccgaaaataccagcatctcgccggcgccattggcgcgatagaagtcagtcccctgccccggcttcagcatgtcggtccagcgttcgaaatcctccagctcctgcttcggccgctgagtaaacaggttgtaggcgatgcgcacggtcatctgatctttcgcgtgcagctgttcgataatttcgtaatcttccggatagttctggaagccgccgccggcgtctatggcgctggtcagccccagtcggttcagctcgcgcataaattgacgggtggagttcagctgcaaatccagcggcagcttcggccccttggccagcgtagcgtaaaggatcatggcgttcggtttagcgatcagcatcccggtcgggttgccgtggctatcgcggacgatctcgccgcccgccggatccggcgtctctttgctataccccacggctttcagcgccgcacggttcaacagcgcgcgatcgtagagatggagcacaaacaccggcgtatcaggcgccgcctcgttcagctcttccagggtcggcatccgccgctcggcgaactgaaattcgctccagccgccgaccacccgcacccactgcggggacggcgtgcgatccgcctgatccttcagcattcgcagggcatccgccagcgagggggcgccctcccagcggagctcaaggttgtagttcaacccaccgcggatcaggtgcaggtgagaatcgttgaggcccgggatcaccgtatgccctttgagatcgacgatttgcgtcccctcggcggcaaagctcatgatccgatcgtgacttccggtggcaacaatttttccgtcggcgatggccacggcttccgccaggggattcgcacgatcgagggtatgaatctgaccgtgggtcagaatcagtgtggcagtttgcgacataacgcactccttgaggaggctgactcagtttttcttcaaccagccagcaaacaggcgggtcacgatgggcatccagaaccagaccaccagcgcaaccacgcaggcatcattgatgaggtgcagcagcaggctccccttaagcgacggcagcagcatgccggtcaccgcaggcaccaggttggtgctggggaaaatcaccagcagggtgatcagaaactgtttccagcgccgcggctggcgtacgttcaccgtcggcggggtaaaccagaaggccggttcagtccgcacctcagtccgatcgccttccgtcagcagtggggcaatctcagccaccagttgccgacgggtttccgactgcgtccaggcgtagaggtgctccagggtatcgaagcggattatgacgctccacagattctgccctgcggcgggccggatcacattcgccccaagatggccgggaaattctgccgcaatgggcataattttaccgagccactcttcgtagcgctggctgtgttgcggatcgagcagatggctgataaccagggtcaccgatttttgctgcgccatgacgagttccttgcttcagggaaatggccggttttctcctgccactctccataaatgatctgacacaacatccttcatgctgcgttgaagcggcaggcgggcacgtccccgtgaacttgaataaattcagtagctggggacggacaaacgcagccaacaacgcagcagcctgaaggatggagtgatttacgctttacgctccggcgcgccatgcaccatggtataagcgtaatccacgcccatcccgtaggcgccgctgtgttcgcgcaccaggtccattaccgcatcgtaggtcgctttgcgcgaccagtcgcgctggtactccagcagcacctgctgccaggtcaccggcaccgcccccgcctgcaccatccggtcaatagaccgctcatgggcgtcgacagaggtgccgccggaggtatccgtcactacatagacctcgtagcccgcctccagcgccatcaacgccgggaaggtcaggcagacttcggtccacagagcggagatcaccagctttttacggccggtcgctttcaccgctgccacaaacgcatcgtcttcccaggagttcatggaggtacgttcaatcggcttgacgtcaggatgcacggccaataattccggccagatatagccgctaaagcttttggtctctacggaggtataaatcaccggtacattaaaaattttgcccgctttcgccagcgccacggtgttatttttcagggtctggcgatcgatattcgccacgccaaaggacatttgcggctgatggtcaataaagataagcgcggaattagtgggatcgagcagttcacgaatagacattaaataccttcttaatcaattagttaaaaagatgacatgatgattaatgcgtcgtgtggatcctgactgataaagcatggtgagtatagccagttatttctaacaagttattaaggattttttatggtttatattttttgccgcgaccaggatttattcacgcctgttttaatcaaatttttacgccaaactgttctgatttattcactggctttgattattgcgcttaggtacaacagagaaaacaaattaatggatagcttcatatgcgcgtaaactttgatgttttgatgatccttgatgcccttgaccgccacggatccttcgccaccgccgcggagtcgctgtataaaacccccgccgctctgagctatatgatccagaagctggagagcgatctgaacatcgtgctgttggatcgttccggccatcgggcaaaatttaccgataccggccggctgatgctggagaaggggcgacagcttttaagtgccgccagagatctggaaaagcaggcccagcagctgagcgcgggctgggagcgagagctagccatcgcccttgacgcctcatttcccttttcggctctgctgccgctgatcgccgagttttacgcgcaaaacccacagacgcgactgaacttcagccatcacaccctcgccggttcgtgggaagagctgacccatcatggggcggatattatcctcggcgccatcaatgagccgcccacctccgcggagtggtcatggcaaaccctcggcgcgttggataacatcttcgtcgtcgccccccatcacccgctggctcaggcgaaggagccactggccaataaacagctcagccagcatcgggccatcgtgatccgcgacagcgcccgctattgccatccgctcaacagcaatctcctcgacgagcagccgcaaatcggcgtcgatgatttcgccagtaaagtcgaactattgtacgccgggctgggctgcggctttctgccgcgccatatcgctcgcccgtggctggtaaaaggcagtctggtggagaaaagcgtcgcctgctggcgggaaaaggatattacctatatggcctggcgcagcgggaatgatgggctggctcagcgctggtggcgggaggcgctcctccgcggcgacctgctgagccagctctaccattaacggccggaccagacgttggcggagatggccgggagggtcagcaccccgtcctggaaggcgccggcgccctcctgcagcgtccacccggccacgttcagcagcggggaatcttcgataaccacctcgcaggcttccccgcggttaatcgccaccagcacccgctgctgtttgtagacgcggacaaacaccaccacgttatcctcggcgtaaatcacctgacagccgccatagcgcagcgcctggtgggccttacgcagtttcgccatccgctgatacagcgccagcagctgggtatcctgcagcgccggatcccacgggaacggtttgcggcagaacggatcgttattgccatccacgcccacctcgtcgccatagtagatgcacggtacccccggccagctgaacagccacaccaccgccagcggcaagcgcgctacgtctttgccaagaagagatttaaaacgcgccgtatcatggctgtcgagctggttgaacatccgcagctgctgctgatgcgacagcccggcgcgataattatccatccacgccatacaggtctgggcgtctattttctgcggatcgtaagaaatatcggtattggcgaggaatccccagatcgggaaggtgaagccgcgatagttcatcgccgcgtcttcggcatccgcctgcagccactggcgcgcgtcgccaaaatgttcgccaaagacaaaagcttccggctgcgcttgcttcgccgcctgggtaatgccggcgatatgctgcaggttattccgcgccccgccgccttcgcccagcatatgcaccacgtccagacgccagccgtccatgctccatggcgccttcagccagtggcgtacgatactgtcttcaccggcatagatctcgttgaccaggctggtcgaccgatagtcgagcttcggcagactggcataacccagccagttgtgcgcctgcccctcctctgagaaggtaaaccagtcgcgccacggggagtccggatcgtggccggcgccgccgctgccctgctggtgacggtcgaaccagggatgggaatcgccggtatggttgaacacgccgtcgaggatcatgcgcattcccgcccgctgggtgttgtggcgcagccggagcagcgccgcgtcgccgccaaactgcggatcgacgcgccgataatcctcggtatcgtatttatgcacgctgggggcggcgaaaaccgggttcagatacagagcggttacgccgagctgcttcaggtagggaagtttttcgctgatgccgtcgagatccccgccgtagaacgtcgacccgcccgcctcgccggtaagcgggtcgtcccacgccttgcgcacaatctcccgtcccgccgcgtgatggtaatagaccgcatcctggtcggcgtcacgcgcggcgctgcgggcaaagcgatcggggaaaatttgatagaacacctgatcggccacccactgcgggccggcgtccggcaggtcaatggcgaactgctccagtctggccggcgggaatcgggtgaagccttgtggcgtaaaccagcgctgatggtcggcccacagcagcttaaagctgtagcggcggcgcggctggccgctggcgagagagatttcgccgcgccatgccaccacgcctggctgtggcgcctggcggagccgctgcatcggcagcgacagctcttcgttatcctcttccgcgcgcagcgtgatccgctgcggcagcgactcaccgcttaaccacagagtaataaacagtcggtcctgttgcaccttgataaagggtgcaaccggaaggtgccatgccttcaacatcgtgaatcctcattgtgcagaatgggcacaccttgccatagccgccgggcgcagaactcatcatctcagaactttttgggggaggataacgggggaggacgcgggaccgcaagccgccccggtcgcgcgatgctgaccggggcgatgtcgattactgagcctgcgccaggcggcgctcacggcgggtcttaaagacccagccgagcagcaacagcgcaatccacgccataccgacgtacagcgagatgcgggtgtccggatgatagccgataagggcgataataaaggccaggaacagcaggccgatcaccgtggtcaccaccccgccagggactttgaatttcagcgccttaacctcttcgggcgacagacggcggcggaaggctatctgtgacagcaggatcataatccacacccacaccgtggcgaaggtggccagggaggcgatcaccaggaaaacgttctccggcatgatgtaatttaggtataccgcaaacaggagcgcaatggtcatcaccatcaccgtcacccacggaataccgcgacgcgacgttttagcgaacaccttcggcgcgctgccctgctcagccatgccgtgcagcatacggcccacgccgaacacgtcggagttaatcgccgacagcgaagccgtcaggaccacgaagttaagaatactggccgcgaaggtaatgcccagatgctggaaggtcaggacgaaggggctgccgtcggttcccacctgattccacgggtagatggacataatgacgaacagcgtgccgacatagaacaccagaatgcgcatcggcaccgagttgatggcgcgcggaatggatttctccgggtccttcgcctcaccggcggtaatgccgatgatttcgatgccgccgtaagcgaacatcaccatctgcagcgacatcaccattcccagccagccgttgctgaagaagccgccgttgctccacaggttatgaatccccgtcggctggccgccgttgccgatcccccagataatgatgccgaacccggcgaggatcatgatgataatggtggccactttgaagaacgagaaccagaactccagctcgccaaacaccttgacgctcatcaggttgacggcgcagatgatcagcaccacgctgagcacccagatccagtgcggcaccgtcgggaaccagacgcccatgtagatgccgaaggcggtaacgtcggcgatggcgacgatcaggatttcaaagcagtaggtccagccggtgatatagcccgccagtccgccgaggttttcctgggcatagcgggagaatgagctggcggcagggttatgcaccgacatctcaccgagcgcccgcataatgatatatgccgcgacgccgccgataatgtaggccaacagtacgctgggtccggccattttaatggcgtcggccgagccgtaaaaaagcccggtgccgatggcggaacccagagccataaagcgaatgtgccgggtgcttagcccgcgcttaagcttgttactactttccatcgtggtttttcaatgccgtttaacacaaaaaataaaaaaccacggaacccgaagtcccgtggttaaacgcttgtcctcaccgccggttaatgcgcgctggaagtcacctgacgtccggctgcgcgatcccagatcaccgcgagaatggtcatcacggcggtgggcatcagccaggccaggccctgctccgccagaggcagacgcgcggtccagtccggcagaatcgcggcaaatgccgatgacttaatcccgtcaatgataccaaacatcaggctgataaacatggccggcgcgataacgcgggacgaattatgccaccaactgcgggtaaagcttaatacaaccagtgcgatacacggcggatagatagcggtcagcaccggaatcgatacctggatcagatggctaaggcccaaattggagaccgccatggagaacaggccgagaacaaagaccagcgtgcgataggagaacggcagatactgggcaaagaactcagcgcaggcgcaggtcaggcccaccgccgtcaccaggcaagcgatgaagatcagcgccgccagcaggaaactgcccgccccgccgaaggtgtgctgcacgtaggcatggaggatcgccgcgccgttggcggactgatccacgagagtagcgctgtcagagcccagacggaacagcgccagatacagcagggtcaggccgacgcccgccatcaggccagcccagacggtataacgggtcaacagacgcgcttcgctgacgccgcgtgagcgagcggcattaacaatcacgatgccgaacaccatcgcgccgagggtatccatggtcaggtagccgttgacgaagccattggagaatggcgccgtacgatacgcttccagcgcgtcgctgatcgggcccgctggccagatgatggcggcgaccgccagcacaatcagggcgataattttcagcggcgcaaggaaattgcccacggtgtccagcagtttgcccggatagagggagaccagaatcaccagcgcgaagtaaataacgctgtagatcagcagcggcagcgggccgtcgccggtcagcggcgcaataccgacctcaaaggagacggtcgcggtacgcggcgtcgcgaacagcggtcctaccgcgagatagcacaccaccgccagcaggataccggccactttaccaatcggggtgctcaggctttcaacgccgccgccgactttcgccagcgccaccaccgtcagcaccggcagacccaccgcagtgatcaggaagccgatcgccgccgtccagacgtgctcgcccgcctgtaagccaaccatcggagggaaaataatgttgcctgcgccaacgaacaacgcgaaggtcataaagcccaacgctatgatgtcgcgagattttaactgatgggtcataaattcattactgcctgtggatgtggtgttgtaaaaaaaatggaaaaataccgcgctcccctctcagggacgatacagcggccattgccggtaaactcagcgagatatgctcccgaagcggcgtgggaaagaattgtttttggtattaccacgcaaaagcagtctgtcatcgactgcgcaggcgcaatttaaacgcttataacgttttaaagcaaggcacgatcgcaaaagcagatgattatgctggttatgtctttcacaccagaatcatttaccatattgatagaaaacccgtggcttatcatgcgaacaaaaaagcagcgcacgctcattaaataggcgagaaaaaacgactgccaatgaaaatgaccagctgaagctggtcattggcaagataaactgacagcgcgtcgatcaggcgtcatttttggcaattaatcgttccgggagcaggaagctaaagcgggttcccttgcccaccgtgctgtcgatttccagccggctgtcatgatggttaaccgcgtgtttgacgatcgccagtcccaggccactgccccccgtttgccgggaacgtgctttatccacccgataaaaacgctcggtcagacggggaatatgctccggcgcaatgcctggcccgttatcctcgacgctgaacagcgctccctgcggggttcgctgccagctgacgcgaatttcggtccccggcggggtgtggttcaccgcgttatagaccaggttggagatggcgctgcgcagctgctcctcattacccagcaccttgagctgctcatcgacggtgaagatcagcgtctgtttctcctggctgagagtttgcgcctcgcgctccaccacccgcagcatcatcggcacgtcgatgcgatcattcatcgccagcgccggcgcggcttcaatacgcgacagcgtcagcagctgcttcaccaggccttccatacgttgagtttgctcccgcatggtgtgcagggctttttctcgggtcgccccctccagcacctgctcctgcatcatctccagatagccctgcagcaccgtcagtggggtgcgcaactcatggctgacgttggcgaaaaagttccgccgcgccccttccagctgatgcatctgcgtcacgtcgcgcgccaccatcagccactgcttgtcgctgtagggcatcacgcgaatttccagatgacgggcgttattcagcaccagattgagcggctttgaaaaatcgcgttgtttcagatagttggcgaactcgggatagcgcagaaggttaagaatgttttggccactgtcgtccggccagcgcaggtttagaatctgctgcgccaggccattacaccagaaaatagccccctcttccgtggtcaggacgaccgcatccggcagcgattccgccccgctgcgaaagcgtttaatcaggcttcccagctcgcgccggcgctttttattacgcatctgcatctggtgcagaccatacagcagcggctcccaactgccgcggccaggcggaggagtcatgctccggtccacccacagccaccacgacaggcgcatcaaattccagaaatgccagatcagcaaaccggtcactgccgccagtaaaaaccacggcagatgacccacaaacgcccccagaatcagggccggaatacacgctaaaaagagctccagcgccagccttttccatgacagccgttccagcacgggtcacactcctgtcaaaattcagaaacgggcggagaaacgataccccgtgccgcgaaccgtttgcaccatacgatcatggccactgtgttccagcgctttgcgcaggcggcgaatatggacgtccaccgtgcggtcttccacataaacgttggtcccccagacgtggttcagcagctgttcgcggctgtacacccgctccggatgggtcataaagaagtgcaataatttaaattccgtcggtcccatatccagcggactgtcgccggtcattacccggtgcgatgaagggtcgaggctcagcccctgcatttcgatcacctcttccaccgccatcggtgaaatacggcgcatcaccgctttgattcgcgccaccagctctttcggagagaaaggcttggtgatgtagtcatccgcgccggtctccaggccgcgaacgcgatcctcttcttctccacgcgcggtcagcatcactaccggaatatcccgcgtcatcgcctcgcgcttgagcagtttaataaactgcagccccgaaccgcccggcagcatccagtccaggagaatcaaatcaggccagggttcattgagttgattgaccgcgctgtcataatcttccgcttcgacaggctgaaagccattttgctccagaacaaagcagaccatttcgcggattggagcttcatcttcaacgaccagaattcttctcgccattatttaccctgtgttttttagccatcagtatagaagtgcggcgtcattatgcgtcacttttgtgacagatttatgaaaaaaatgaccgtctgatgatcgggtattttgaagcacgacgcggacttacccctcactaacaagtggtatactgccgcccatgcttttttcgctagggaagatttatgcgcctccttcacacctccgactggcacctgggccagaatttttacagtaaaagccgcgcggccgaacacgacgcttttcttacctggctactggaccgcgcgcaggagcatgaagtcgacgccattatcgtggctggcgatatttttgataccggctcgccgccgagctacgcccgcgaactgtataaccgtttcgtcgtccagttgcagcagaccggctgtcgcctggtggtgctggcgggcaaccacgactcggtggcgatgctcaatgaatcccgcgatatcctcgcctttttacacaccaccgtggtggcgaacgccggctacgcgccgattgagctgccgctgcgcgacggcacgccgggcgccatcttctgtccggtgccgtttttacgcccgcgcgagctggtgaccagccaggccggtcactccggtcgggaaaaacagcagcagctgctgcacgccatcagcgactattatcaggagcagtatcagcaggcctgcgcgctgcgcggcgatcggccgctgcccatcattgccagcggccatctgaccaccgtcggcgccagcaaaagcgatgccgtccgcgacatttacatcggcacactggatgcctttccggcgcaacacttcccccctgccgactacattgcgctgggccatattcaccgggcgcagatggtcggcggctgcgagcatatccgctacagcggctcgccgctgccgctgagcttcgatgaaaccggcaaagcgaaatcggtgcatctggtgagctttagcgaggggcgacttagcgccgtggaaaccctggaggtgcccgtgacccagcctctggcggtaatcaaaggcgatctggccgccatcaccgcccagctggagcagtggcgcggcgtcgagcaggacccgccggtgtggctggatatcgaaatcaccaccgaggactatctgcacgatattcaacggcatattcaggcgctgacggaggatctgccggtggaagtgctgctggtgcgccgcagccgcgagcagcgcgagaaaatactgctcaacgcccagcgggagacgctcagtgaactgaaggtggaggaggtattcgagcgccggctggcgctgaccgaaattgacgagatgaagcgcgcccggctgcatgagctgttcgcccatacggtgcatacgctcaccgcggaggacgaaaacgcatgaaaatcctcagtctgcgtctgaaaaacctcaactccctgaaaggggaatggaagatagactttaccgccgagccgttcgccagcaatggcctgttcgccattaccggcgccaccggggccgggaaaaccacgctgctcgatgccatttgcctggcgctctatcatgagacgccgcgcctgaataaagtctcccagtcgcaaaacgacctgatgacccgcgataccgccgagtgtctggcggaagtcgagtttgaagtaaaaggcatcgcctaccgcgctttctggagccagaaccgggcccgtaaccagccggatggcaatctgcaggcgccccgcgtcgagctggcgcgctgcgctgacggcaaaatcctcgccgataaagtctcggacaagctggagcaaaccgcgacgcttaccggcctcgactatggccgcttcacccgctcgatgctgctttcccaggggcaatttgccgccttcctgaacgcgaagccgagcgatcgcgcggagctgctggaggagctgaccggcacggaaatctacggccagatttcagccatggtctacgaacagcacaaagccgctcgccatgcgctggagaagttcgaagcccaggcggcgggcatcgtcctgttgacggaggcccagcagcaggcgctgcaggaaagtttgcaggtacttactgacgaagaaaaagccctgctggcccagcagcagagccagcagcaccagctccagtggctgacccgccgcgacgagctggcgcagcagcagcagcaggccgccacccggcagcagcaggcccgccaggcgctggcggacgccgccccggcgctggcgaagcttgagctggcccagcccgccgcccaactgcgtcccctgtgggagcgccagcaggagcagacggcaggcctggcgcaaacccggcagcggatcagtgaagtaaatgctcgcttacttgccagcacggcgctgcgcgcgcgcatccgccagggcgccttgcgcgctcagcagcagcgtcaggctgaactggccgatctggcgcagtggctggccgcccatgagcgtttccgcttatggggtcaggagatcgccggctggcgagcgcaattctcgcaactgacgcgggataaacaacagctaacggctcagagcacccgcctggccgcgctacgccagaagctggccacgctgccagccagccctctcaccctgagcgcggatgacgttgccgcagcgatagaacagcaaacccaatcgcggccgctgcgccagcgcctgatctccctgcatgagcagcaccagctgctgcgcaagcgtctgcgccagaacgccgagagcgtccagcaggcgcaggcggagcaggtaaaacttaacgctaccctgacgctgcgccgggaacaatataaagacaaaaaccagcactatctcgacctgaaggcgctctgccagcgggaagaaacgattaaagacctggaaagctaccgcgaccggctcgaggcgggtaagccctgtccgctgtgcggcgcctgtgaacacccggcgattgaacaatacgcctcgttgacgctcacggataatcagcgccgccgcgatgcgctggaaaaggaggtcgccgcgctgaaagaagaaggcctgctgatcctcgggcaggtcaaggccctgacgcaacagctccagcgtgacaccgaagcggccgggcggctcgcagaggaagagcaagcgcttactaaagcgtggcaggagacctgcgcctctctgcacatcacgcgggatattgcgcaagagataaacgactggatgcaggagcaggagcgctacgagcagcagctctatcagctcagccagcgcctgatgttgcagagtcagcttaacgatcagcaggcgctggagcgccatgccgagcagcagctggcggccacgcgccagggactggagagcgccctgcaggccctggccctgagcctgccggcagaagggacagaagccgcctggctgcacgctcgcgaaagcgaatttgcccagtggcaggcgcaacagacccaacatgatgccattcagcagcaaatcgctgctctgcggccactgctggagacgctgccgaccagcgacgagacagaggttgaagctgagtcggccatcccggacaactggcgcgaaatccacgaggaatgcctgtcgctgcacagccagcttgtcgcccagcagcagcaggaaacccaggaaaaggcgcgtctggaccagtcgcaggcgcaattcacctccgccctggccgccagccgctttagcgatcgggaggcgttcctcgccgccctgctggatgacgagaccgcccagcggctgacgcagctaaaacagacgctggagcagcagcttcagcaggcggccgcgctctgcgagcaggcgacccggcaacatgaggcgcacctggcgctgcgtccgcaaggggtggacgctgacgtccccaccctgcaaacccagctgcacgccctggcccagcggctgcgggataacactacccgccagggtgagatccgccagcagctcaggcaggacgcagagagccgtcaacagcagcaggcgctggggcagcagattgcagaggcggcgcagctggcggacgactggggctatctcaattcgctgatcggctccagcaccggcgaccggttccgcaaattcgcccaggggctgacgctggataatctggtctggctggcaaaccagcagctcaaccgcctgcatggccgctatctgctacagcgcaaggccagcgaggcgctggagttggaggttgtcgatacctggcaggccgacgccgtgcgcgacacccgcaccctctccggcggcgaaagtttcctcgtcagcctggcgctggccctggcgctgtcagacctggtgagccataagacgcggattgactccctgtttcttgatgaaggcttcggcaccctcgacagcgaaacgctggacacggcgctggacgccctggatgcccttaacgccagcggtaagattatcggggtgatcagccacgtggaggcgatgaaagaccgcattccggtgcagatcaaagtgaagaagattaacggcctgggctatagccggctggacaaagcgtttgcggtggagtgaggtctgaattatggcgatgttccctcaccctaaccctctcccgagggagagggtccgggtgcggggaagcggttcaggtcccctggagcggccacagccaggccgcgccgcgtaccccgctggagtcgccgtgcatcgctttgcggatcggcgtttcacactcgccgccgaagacccactgcttcaccaggtccggcaccgtctgatacagccgttcgacgttgctcatcccgccgcccagcacgataacgtccgggtcgaggatattcactacgtgggccagcgatttcgccagccgctgttcatagcggctcagcgccagttcagccttttcgtcaccttctcccaccaggcgcataatctcgctgccggttaacccttggccgctcagccgctgatagtcggtggcgaaaccggtgccggagataaaggtttcgatacacccctgtttgccgcagtagcaagggacttccgcacggtagcgtagctcatcgtcgttcatccacggcaatgggttatgtccccattcgccagcgttaccattgccgccgatatgcgcccgcccgttgagcgccaccccggcgccgcagccggtgccgataatcaccgcgaataccgtttgcgcccccgccgccgcgccgtccaccgcttccgacaccgccagacagttggcatcgttagccagccggacttcccgctcaaggcgcaggctgaggtccttatcaaagggctggccgttgagccaggtcgagttggcgtttttcaccaccccggtataaggcgaaattgagccaggaatgcccatccccacggtaccctgctgtccggtcgcctgctcggccatcgccaccagagtggcgatggtctcgatggtttgccggtagtcctcccgcggcgtgggtaaccggtggcgaaacagctgctctccctgatcgctcagggctatcacttcggtttttgttccacctaaatcaataccaatacgcacgctcagctcctcaccccgattaacaatgcaagcatagcgacaattcgctatcatgcccgcctgatttaacgacaaagccgtggaaattatcatgctgtggttcaaaaatttaatggtttaccgtctcagccgcgatatcgaattgcgcgccgaggagatggaaaaacagctggccgagctgacatttaccccttgtggcagccaggatatggcgaaaaccggttgggtgtcgccgatgggatcgcacagcgacgcgctgacgcatacggcaaacggccagatcattatctgcgcgcgtaaagaagagaagatcctgccgtcgccggtgattaagcaggcactggaggcaaagatccagaagctggaagccgatcaggggcgcaagctgaagaagaccgagaaagattccctgaaagatgaagtgctgcactcgctactgccgcgcgccttcagccgcttcagccagacaatgatgtggatcgacaccgtcaacggcctgatcatggtcgactgcgccagcgcgaagaaagcggaagatactctggccctgctgcgtaaaaccctcggctcgctgccggtggtgccgctgaccctggagaatccgattgagctaacgctgaccgagtgggtccgctccggcaccgtggcgcagggcttccagctgctggacgaagccgagctgaaagcgatgctggaagatggcggcgtgatccgcgccaagaagcaggatctggttagcgacgaaatcgctgtacacattgaggccgggaaggtcgtcaccaagctggcgctggactggcagcagcgtattcagtttgtgatctgcgacgacgcgtcaattaaacgcctcaagttctgcgatgaactgcgcgaccaaaacgaagatatcgatcgggaagatttcgcccagcgctttgacgccgactttatcttaatgaccggcgagctggctgccctgatccaaagcctggtggaagggctcggcggcgaagcgcagcgctaagcgccgctttccttcctgccgggcaggaaggaaaaaacaacccggcggcagacgccgggcgtcacgctggcttacagatagcggcacagataagaggttggctcagccacctgcagatgaaattcgctgttgcctggcacattgaaaacttcgccggcagcgtaaactttccactcagtctcacccggcagcaggacattcagcgccccgctgactaccgtcatctcttccggctgcgccgtaccaaaggtgtattccccttccgccatcacgccaacgctggcgcgaccggtactgctgctggtgaagccaatggatttcacttttccgtcaaagtattcattgctttgaagcataaacaagcccttctgatcgtcggttaaaggctcaatatagggggcgctccttgcccctgtcacgcgaaattaacacattagaccaatagttctgccgccagtcgggaaaccagcacattcgacagcaaaaccggaacatcgagggctttttgtaacacatcgcgatgatgctgatagtaaccgagacagtcgaggaccagcacgtcggcgccctgctccagcaacgttttgccggcggttaataactcgctgtcgctgccggtaaacggattggccagcgcgtagtatggcgacttttccagcgagagccacttttgccgctgcatgggcatgatctcttccaccggcacgatcacccctacctggtgcccatcgacgatcgatgccaccagcggcgggatgatccgctgcggctcgaggaggatcgcgtggtgggtggtaaaaccggtcagctgttcggaactgagcagcaggatcacatcataatgttgtcgatccagcatcgcgatcgcgctgcggacatcgcgttcaattttctgtcgcgacaccatcaccaactggttattactgagcaaggtcaggagtcctttctcgccgtcacctacggcgtactcggccattacctcgtcaggcgtcatctcgcccagcaggctgatgtgggcgatctgttcttccctgatatgttcggtcaggagcggcaatactcccgccagcggcacaacgccgatggtcaaaattgccatcgttgcactactcatatcatgtaccttttcacaaccactgcttcaacacaggctttccacacacagcatccgcccccctggtgagtaaaaatcaaccgtcgagaagcgtagcagctccacgccgcggttgaatgtaaagattgccgggcggcggcgccgtgcctgaaaaatccgtgtgttagatattcattagtacgactgataaataaaaaatgtgagatacgcccgatattgccagcatggcgggcaattcgggctcagggggttacgacttgtcaggatcttcataacgccgtttggcatccacggcttcctgctcggtaggatgttcgctgataagcgaatcaggctcaggataatccgcacggagctgataccaggtcaccgtctgaccctgaggacctttctctaccgcaaccacgcgcgcttctctcggatatgggggcctgtttggcatagttcttccttcttctggtagcagaactattaagtataggcgcccctcgccgccttaatgtaagtaaattcttaacttaccggggttgccgtcgcgctgcacagcatggacataatctgctccaccacccgatccggcgaggccgtggcatccacaatatggtgggcagcgtcccggtataacgcttcgcgctgcgccagcacctcgcccacttcctcgcgcaccggttttccggtcagcgtcggccgctgttcggctttcgggtaggcttccagacggtcaatcagcgccgacaccgaggcctgcagataaatcaccacgccattctcccgcataaactgacggttaccttccgccagcacaataccgccgccggtggcgattaccgtattcggcagggtcacggccttcagcgacagggtctccagttcacgaaaacgcgcccacccttccgcctgcacgatctcagccaccgtccgctgctcatgggcctgtagccgatgatcggtatcggagaactgaaaatgccgcgctcgcgccagcgcatggccgacggtggttttaccgcagccgcgtggcccaataagaaagataggctgtgtcataaccgaagaccccctggttccgtctgtcgcaaaaaaatgaaaacgaaagcacgtattatcgctgtctgtcccgcaatgcatacgtaaagaaaaaattacacaacttctttacaccccattaccacggtgagaagaggggctattaatgtaaacttatcattgcatttagtgtttaaccagctttactttccgcttggcgttattttttatccaccgctggcgtaaacggtaacacatttatgcatagctttacgaagcaacatatttacaacatcatgtttcagaagcaccctgatgcctattcgacagtgtgacagaggaatgtaacatgcaatctgaagaacaacgccttattgatggactgttttcccggctgaaagaggctgaggcgcacagcgcatcgcgcgatgccagcgccgaggagcggattgcccaacacatgagcgcgcagccggcggccccctactatatggcgcaaaccattcttatccaggaagccgcgattaaacagcttaacgatcgcatccaggcgctggagagtcaggtcagccaactgcaggcggcaaagcccagcagcggcggcttcctctccggcctgtttggcggtggcggctcgtcacgcggttctgaccctatcccgggcgcggagcaatatggtcgcccgcaggccagcgcccagccgcagtatacgccaccaccgcagcagaactatgccccgcaggctgccgcacgcggcggcggctttatggcgggcgcgctgcaaacggccgctggcgtggcaggcggcgtggtgctgggcaatatgctgaccaatatgttcagcggctcgcacccgcaggagatcgtcaatatcatcgaagagaagccgcagcctgatgccgcctccgcgcaggacagcatcgcgcaggacaccaccgcaggtgacgatccgttccgccagggagacgatcagttccttgccgacaatacctggaacgacgacttcgacgccggctttggcgacgatgattttggcagcgatgacgatagctgggtttaaccctggcgacgcttaaccgccagcaaccacttctccagctcggcggcaaactgttgccgatcgcgctgcgataaactatccgggccgccggtctgaacgccgctggcccgtaatgtctccataaaatcccgcatcgtcagccgctcgcggatcgtcgcctcgctgtaacgttccccgcgcggattcagcgccgccccgcccttcgccagcacctccgccgccagcgggatgtcggcggtgatcactaaatctcccgccgcgcactggcgaacgatttcattatccgccacgtcaaaaccctgctcaacccgcagggtgcggatgaaacgcgacggcggcatgcgcagcggctggttcgccaccagcgtcagcggagtctgggtccgctctgccgcgcggaacaaaatctctttaatcacgttcggacacgcgtccgcatccacccaaatggccatgccagctcctgttacctgcaataagtgacgccaatgttacctgcttttctcccccaggaaagcgccaggatggtaagctaatcagatcgtaacgaaaaaagcagaggggaatggtgatggataagaaaattggctttatcggctgcggcaatatgggtaaggccattctgggcgggctgatcgccagcggtcaggtacagccgggacaaatctgggtctacaccccgtcgccggacaaggttgcagctctgcgcgacaagtatggcatcaacgccgccggcagcgcccaggaagtggcgcagattgccgatatcgtcttcggcgcggttaaaccagggatcatgaccaaagtgctgggcgatatcgcctccagcctgaataaagagtcgctggtggtctctatcgccgccggcgttacgcttgagcagctggcgcgcgcccttggccacgatcgcaaaatcattcgcgcgatgccgaatacgccgtcgctggttaacgccggtatgacctccgtcacgcctaacgccctggtgagcagcgaagatgttgccgaagtgctgactattttccgttgctttggccaggcggagcaaattgccgagccgatgatccatccggtggtgggggtaagcggttcggcgccggcctatgtctttatgtttatcgaagcgatggctgatgccgccgtcctcggcggaatgccgcgcgctcaggcctataaattcgccgcccaggcggtgatgggttccgccaaaatggtgctggagagcggagaacacccaggggcgctgaaagatatggtctgttcccctggcgggaccaccatcgaagccgtgcgcgtgctggaagagaaagggttccgctcggcggtaatcgaagccatcacccagtgtatggaaaaatcagagaaactgagccgctcctgaagctgagctggcgggcttcaagccctgataggttaaagaacaagggagcgcgtgcgctccctttttttcaggctttcttcaggcagctactcatgaaggtactgcgttcatcgcccttcagtgatttcgccgtggccgctttgctgcagtcgctcattttctgctgctgaggggtgagcgcctttccctgcgaggtcgtggtctcttttttcagacactggctcataaaggttttgcgctcctcacctttcagcattttggctgacgcttgctgattgcagtccgtcatcctttgctgctgaggagtgggcgttttttctgccgcgccaaccgcgctgataaagatcaagccaaacagtagggtcatcaataaagttattttcatcgcaccatccttctgtgagtggaacgttgtaagtctggacgcagatagaaaaaaaaccagccggtgacgcaatttcgccaccggcagcgacttatttgagactcagggcagctttcatggtcgtgaacaggtcggtctgatcggtcaggccgacgacgttagccgcatgcggaccgtaggccgcaatgcgcagttgggtgccggtgtgctccatcgactcttcctcagagttgccgtagctcatcaccatcaccgcgccatcgtgcgtgttcagagcctgggtcagccccggggctttgctatccgccgggatgatctggctggcatgcgcatggtcggcggtgacgatcaccagggtattaccgtcttttcgcgcgaattccagcgccttctgcaccgcttcgtcaagatcaaccgtttcgccgatctggccgcacggattggccgcatggtcctgcttatcgatggacgcgccttcgacttgcaggaagaaacctttctcgttgcgactcagcaggtcaatcgctttctcggtcatctgcgccagcgtcggcaccgaggcgtcacgcttcgggtttggcgtacaggtcaccggcggcttatcgatattgccgtgataagacgccttcggcccttcccagcgtaccggcatattgccatcggcaaagagtcccagcagcggtttatcctgactggcttccgtcgcggcggcaagagaagccgcgtcggtcacaatctggtagccgcgcgcttgcgcctgctcgcgcagggttttgccctgccactcgcccgccgtcgccgtttcggtaaaggtcttcgcgccgccgcccagggtgacatccggtcgggcgttcagcagctgttcggtaatggagcctttgccccctttttccagcgcattgctggggcatttttcgctggtgaccgtcgggccgtagcatttacgcgatgtcacatgcgctaccaacgccgcgggggtggcgtcctgcagctcggcggtggaaacgttgccggtggccagccccgccgctttcgccagctcgaggatggtctgatgcgcattctcatgaatatcgacgcccagcgcgccgttataagtcttcacgccggtggtccaggcggtggcggaggccgccgagtcggtcacgtagtccggtttcccggtttttttatccagcgaataatgcgtgtactgcccggttaacggcagagcatcaattcctttaaagaaaccgcccgccccctcggcatagtttcgcgcagcggtaatttccgaatcacccatgccatcgccaatcagcagaataacgtttttagctggcttattgattaacgaggcgcgcagcgcttcggtttgatcgcctgttaaacgacgcgcgccgccaggagtggtgatatctccctgcgcagcgcgattttccagaaccggcgcagcagtagtttctgcatgaataaccggcgagcccagtagaggaatcagggcaataaacagggcgcttaatttcacttttgtcatctccatgtaaaaaatacttaaaaaaacaaaacgagggagactttataaaagggagatgacagaaaaatgacggcatccttgtcgtgtcacaaagactagctacgaggatgccgcaacagcttctttagatattgctgcaacagcatcgcatcatggtcgttgaccggcggacagggggtcacctggtcaatcgcctgttcaatatcctgaatcaatgcctgctgggcatcatgctccatatggcgcaataatgcggtgaccacgatctccagcgcttcaacctgcaccgtcagttcctttgcttcttcttccttttgcgccagtttaaccagtaactcagcaatgagattcttcatagcaccagttccttatgcgaggcctgttttgattgggatgtcatacgcgatgacgaacctcagaattacttaaattaagaatcatcgcaacacccaatatacagcgaaacgttttaccacaataaaataccactataaatagtattgtttaatcatgaccggggttgcttataaccagattgcctggaaaataataaaatggaatagcgttcacgccatgacgataacaaaaagtaatagtaaatccgctgacggcgaataatgctgacggtatcgcaataaataccgtcagcagaggttcaggcgttagcccggcgggtttggcgcagcatccacgccagttgccagaggttaatgaaaacgataatggcggtggcaataaacacccagcggaagccggccatggctgacacagaggcgccaattagcggcccggcgacgttgcccagatacataaacgactggttatagccaaagatacgcccggtgacgctgtcgctgctgtacttcagcaataaggtctgcaccgccgggagcatcgcgccatcggcaaagccgagcagaaaacgcagcgtacccaattgcagcggggtggtgacaaaggacatggcgaagaacatcaccaccgcgcagcagagcgtcgccagcaggatccgcgaggtgccgatgcggtcgccaagcttacccaaccgtggcgcagaaatcagtgccgacacgccgggcaccgcggcgatcatcccggccagaaaagcgatattgttgctgtccggcgccatcgacttaataaacagcgccagaatcgggccgattgagccgttgcacaattggatcaccagggtggtgaagaacaggctgatcaccagccccggataggacaaagaggcaaagacttgtttcccggtgagacgctcgcttttgctgacctgcgggcgaacgccctctttaatcagaaacagggtcaccagaaaactgatggtcagcaggatcgccgtaataaaaaagaccatccgcagcccgacgtggtccgccaggaaaccgcccagcagcggaccgccgatcaccccgctaatttgcgccgtcgacagcgtgcttagcgcccagccgctgcgctcgcgcggcacctgggaggccaccagcgccatggcgttgggaatataaccggaggttaagcccatgatcgcccgcaggataaacagctgccagacgttggtggcgaaagcctgcagtaaaatggcaatcgccatccccaacgaggcgcgcagcagcatgagcttgcggcctttacggtccgccaggcttccccacattggcgagacgatcgccgagacaagaaaagtgacgctgaaggtcagccccgaccacatcgatagcgcttcatgcgaggtgacgccgagctgggagacgtagaggggtaaaaaggggagaatttgactgatcgccaggccggtaaaaaagcaaccaaaccagacggagatgagattaaccttccaggattccataactacgcatattcattaatgatttgccaattattatctagcttagcaatttcatcccactggtgtactaccatagatgcgctggcggtgagtttggtgttttatggctgcggatgagagcctgacgaagcattttctggtcatttaggctgctcatagcgctttatgctcaaaagcagaagccctgcccgcgcatgccgaaatgaaaatggttggcgtgagccgcgttgtactctggccccagggcgttaccgaagtaatggcaactgctgctcaacagcgccgccagccaggggcgcgaagtctcgctccgccagccctgcaggacgctaacgcgtctaccgtgcgccagacggaaaccgctgacgtccagcgcgtccgccgtggcgtgttcactgcgccgcgcctgttgacgatggtaaatattgcggcaggcaaagctgccgagatgatcgatctgacgcagatcgctcgccatcagctgccgggtcagcggcttcgcctgctgctcgatgtacagcgcactgctcagcgccagcgggcagctggcgagaaaactactgctcagctgcaccgagccaaaattcgccacccgcaccacgttacgcagagggcagcttccctcgctgtcggccaccggccggctggcgataagccgccggcgattggcttccgccagcagggaggcgcactggtctgccgtcagcctgcgcagcttaaacgacgtcagccagcccgggggatcgtccagcgccagcggcgccagcggattcaggtgcggcggcagattgcggtatcccaacaggcccgcgccgagcagcccggccagcaccagcagcgtctttcctctcacgcccactcccgtcaattgatcaggtaaatattatggcagccaggcagcggtttcacatggtatgttatgccctttgatgttatctggatggaagttgaaatggcaaagatgagggttgggatcgtttttggcggcaagtcggcggagcatgaagtgtcgctgcaatcagcgaagaatatcgtggaagcgattgataaatcgcgcttcgatgtggttctgttgggtattgataaacaggggctgtggcatatcaacgacgccggcaactacctgctcaacgcacaggatcctgcccgcattgccctgcgcccttccacggtgactctggcgcagatcccgggccgcgaagcgcagcagctgattaacgccgaaagcggccaaccgctggcggccatcgatgtgattttcccgatcgtccacggcacgctgggtgaagatggctccctgcaggggatgctgcgcatggcgaatctgccgttcgtcggctccgatgtgctgggctctgcagcctgtatggacaaagacgtgaccaaacgtctgctgcgcgacgccgggctcgccgtcgccccgtttatcacactcacccgcgccaaccgcgcgcagttcagctttgccgatgttgaagcgaagctgggcctgccgctgttcgttaagccggctaaccagggatcgtcggttggcgtcagcaaagttaaaaacgaagagcagtaccatcaggcggtggccctggccttcgaatttgaccataaagtggtggtggagcaaggcattaaagggcgggaaattgagtgtgcggtgctgggtaacgaccacccgcaggccagcacctgcggtgaaatcgtcctcaacagcgagttttacgcctacgacaccaagtatatcgacgatcagggcgcgcaggtggtagtcccggccgctatcgcccctgagatcaacgacaaaattcgcgctatcgcggtgcaggcctaccagaccctgggctgcagcggcatggctcgtgtcgacgtgttcctcaccgccgacaacgaggtggtgatcaacgagatcaacaccctgccgggctttaccaacatcagcatgtatccgaagctgtggcaggccagcggtctcgactacaccagcctgatcacccgcctgattgagctggcgctggagcgccatgccgcggaccgggcgctgaaaacctccatgaactaaaacgcgttttaccccgcctggcagcggcggcctcaggcctcttctgccgggcggcggcggatcacaaagcccgcaatccagaagctaatgacccaggtgatcagaccgacggcgtaggattgccacccctgtgtttcaaaccccagcagccccaccacgccattaagaataaaaatcaaccccagcgccacggcgtagtagtgccattcgcggcgaattttatcagtgagcttcatgcggcctccaacagcaaaaaacgcatcttcgcatagccgcccgcggcggtctgtagcgatatggagaatgttgctggattgcgacgccgctctcccttttgtgctcctgtggcgcggttaacacaacggcgaaaacaggattattcctggacggcaattaccagcaatctgatactgatgatggcccctgactgccagaatacctgacatagagctggagaaaaaaccagcagcgcagatgtgggagggcctatggctgaattcagtttttcaaaatcgcttttgggaaataaaaaaaggggcgcgctgaccggcagccatgtcgcctacgggctgttcgtgttgatctgctgctgggccggcgcgcagatgctcagcatgctgatccacgccccgggggtatttgaacgcctgatgcaagcccaggacgccagccgtccgcaagtcgacatcagcctcgccgtgggtaccctctttggtctgatccctttccttatcggctgcacgttcatcggggtactggcgcttatcgtgcgctggcgtcagcgccgttaacgccgcgccatacagtttgcccgccgctcatcaacccgtttcgcaaaccacgccgtcgtcagatttcgggtgatttttggactctccagctggatccctggcaacatctcccgcggcagggttttgcccgcctttttctcggcgagacggaaaacctgctgatagagatcggtcttctcaaacgccaggctgtcgccctttttcaactgacgatggatctcgctgtcgctcatccccagctggctcgccaggcgacgcaccgccagctcggtgctgcccggctcctcgctgtcgtagcggataaggtcgccgtcgagcgccagttttaccccgctggctttcaccaccgcgttctggaaggcggcgttacggctggcgtaccagccggcgttgaagtcggcaaagcggtacaatggcgcactataactggccggatagttcagcagatgataggtgccaaaccacaggccaccgcgcagactgaagacctcctggcgcaccgagccgttcattttccacgggtagccggaggtgtgctgctcggcaaaagcaatgctgacctgcatcggccccccggtgtgcaccgggttaagggaaccgaacagcttctgccccatcggcaccatcccgataaagtcatcaaaaatggcgctcaactgcttttccgtcttcacattgtccagacggtcgctatagcttttaccgtttggcgaggtgatcttcagcgcggtatggaccagaaacggcggaatgtgcattttttccgcccggcggtcaatttcctgccaggcgattttattcagccccggcaccaccggatcggactgatagttagactcttgctgcgcgaccgccagcaccgagcagacgttttcttccgtcggcgccagcttctggctgtcaaacgcggtggcgatggcttgcgcccaggcctcccgatccttgacgctggccggcattttctgccgcaccaccgacgccacgtcaacaggcttctcgccctctttcagcgccggagcctgctggctggtacaggcgctcagcgccatggccgccagcagcgtcaatgaaacgggaataatgcgcgataaacgtgcggccattatgcttccttgtcttgattaacgtaatgtcgggatcgcttcctgcagcggtttgccgtccagctcgcgttcaaaactgcgcagacgtttgtagatggacatcagttccaccagcgttgtccacgagctgatcaggtactggaacgagccgcgcacctggccgaagacgttggtaatttgcgtcatcagcccgagggtaatcgtaccggcaacgatcgacggaaacagcaggaaaaggccgaaaacgttatccacctgcagatagaggatgcgggcgatattgaaatacatatagtggaaatagagacggaaatagttgcgacgcaccgcgcggaatagctcgcgcaccgtcggcggcgtggcgcgagtttcatcgtcctcgccgtaaaccagctctttacgataggccgcttccacgcgctggtttttaaactccaggcccggcagcttaatccccaccaccgccagcaggccggtacccatcagcgaccagacgatagcggcaatcaccaggccatacggcagatggccgacgataggcaggtcgggaacatgttcggagagcgtcaccagcaccggcaggaaggcgatcagggtcatcaccgcgttgataaagctcacgcccatatcttcgagggtggaagcaaaacgcatggtatcttcctgcacacgctgcgcggcgccttcgatatggcgcagatgctgccagtgggccatatagtgctcgttcatcgccgtgcgccagcggaagacgtagtggctgacgaagaagttgttcatcacgccaataatcaccgcgatgatcgcgatgccgagaaagacgccgatttcctgataaaactggttgatgctgaccttatgcggggtggccagcgcgctctggatcaggtcgtagaacggcgcataccaggcgttgatcgccaccccgacttccaccagaaaccaggtgacgaagatgatgagcgaggtgccgagaatcgaccagtactgccagcggtgcgggcagtagacaaaccagaacagcgcgaacacgccgacgcaaaacagatagtaagcgtagaacaccagatagttgagcgaccagaagcgcgccgcgctgatcgccacattttgcgatgccccggtgacccgcagcagccagtcgccgccgcccgcctgccaaaagatcacggccagcagcgaccagataaaggcagaaataaaaaacggccccggtttggggaaaaaagatttaaacatcattgtctcctgctaacttcttatcgttctgctattgctgtgtacgacgcatacgtcggccgccgcgtggatgagccctcgcgggacagacgaatgataagaccggatatcaacagcttagttctgctgccatgcgtgcagaattgtttctgtgggtttcacctgtaaaggattgccaggaatggtcagcgtacgccacacctcattgtagtgggcgataagcgtcgcggcctgcgcggcggggcggtcggcggtggtgtgggcatcttccgcgataacaataccgtacccgcggctggcgccatttttaatggtggtatcgaggcagtagtcggtggcgcagccgcagatgacgaactgctgaatgtcgtgttcgtccagcacctgcgccagcgaggtgtgatagaaggcatcgcaggcggttttggtgacatacagcgcgccagccggctgctccagctcaggaagcagggcgaagccttcgctgccggcttcgaggccgccggcttcatcatgctgaatgaaaataaccttgtccgccgcgcgcaccagacgattaatttgcgcgacgcagcgctcgcgcgccagacgcggcgtggcgaacacgccgttttgcatatccacgaccatcactacccgttgagccgtcattgttctctcccacgaaccttcagccaaacggtcatcatacgcgccggcgaaaaaagccggtatccgaaagcgtaaaaaagtcttttttacgcaccgttacctttttcctgcaggaatgtcgtgaatcccgctttgttctgcgccacttcgtagtataaataccctcttctttttatttatttaatggatgatctccgttgaaacgtagtttgctcatttttgctgcgctgtgcgcggcgtcgtggacctcggtgcaggccgcacagcctaccgttgacccggttttcgcctcggatgtggtcgatcgttacgccaatcatatctactacggcagcggcgccaccggcatggcgctggtggttatcgatggcaatcagcgtgtttttcgcagctttggcgaaacccgcccggggaataatcagcacccgcagctcgactcggtgatccgtatcgcctccctcagcaaactgatgaccagcgagatgctggtgaagctgctcgaccagggggtggtgaaactcaacgatccgctgagtaaatacgccccgccgggcgcccgggtgcctgactggcagggaaaaccaatcaccctggttaacctcgcgacccataccagcgccctgccgcgcgagcagcctggcggcgccgctcatcgtccggtgtttgtctggccgacccgccagcagcgctggaactggctctctaccgcgaccctgaagaccgcgccgggctcgcaggcggcctactccaacctggccttcgatttactggcggacgcgctctccaccgccgccggcaaaccgtatccgcagctgtttgaagagcagatcacccggccgctggggatgaaggacaccacctttaccccgtcaccggatcagtgccagcggctgatgatcccggaaaaaggcgccagcccatgcaacaacaccctggcggcgatcggcagcggcggagtctactcgacgccgggggatatgatgcgctggatgcagcagttcctgtcatccgatttctatacccgcagccagcaggccgaccggatgcagacgctgatttatcagcgtaaccagctgacccgggtgattggtatggacgtgccgggccgcgcagacgcgctgggcctcggctgggtgtatatgaagccgaagaacggccatccggggattattcagaaaaccggcggcggcggcgggtttatcacctatatggcgatgaatccgcaggctaacgttggcgcctttgtggtggtaacccgctcgccgttaacccgcttcaacaatatgagcgatggcatcaacgacctggtcagcgagttgagcggcgcacagcccaacatgcagacggccagccagtaagcccggggaaggtttcgccgatgcgccataacgatcgttttggcgaaacatcccgctgccatttcagttacactatcgtctttcatttcacaaaatcaggcaaaccatgacagatttaatcactcgcccccgccgcctgcgtcaatccgctgcgctgcgcgccctgtttgaagagacaacactgagtttgaacgacctggtgttgccgatctttgttgaagaagaaattgatgattacaaagcgatagaggccatgcccggcgtgatgcgcattccggaaaaatatctggcgcgcgagatcgaacgcatcgccaacgccgggatccgctcggtgatgacctttggtatttctcatcacaccgatgccaccggcagcgatacctggaatgaaaatggtctggtggcgcgtatgtcgcggatttgtaagtccacggtgccggagatgatcgtcatgtccgatacctgcttctgcgaatatacctcccacggccactgcggcgtgctgtgcgaccacggggtggataacgacgcgaccctggaaaacctcggcaaacaggccgttgtcgccgccgccgcgggggcggatttcatcgctccttccgccgcgatggacggtcaggtgcaggcgattcgccgctcgctggacgccgccggcttcaccaatacggcgatcatgtcctactcgaccaagttcgcttcttccttctacggtccgttccgcgaagcggccggtaccgcgctgaagggcgatcggaaaacctatcagatgagcccgatgaatcgccgggaggccattcgcgagtcgctgctcgatgaagcccagggcgccgactgcctgatggtgaaaccggctggcgcctacctggatatactgcgcgatatccgcgaacgcagcgatctgccgctcggcgcctatcaggtcagcggtgagtacgcgatgatcaaatttgctgcccaggcgggcgctatcgatgaagagaaagtggttctggaaagtctcggcgctatcaaacgcgcaggcgccgacctgatcttcagctatttcgccctcgatctggccgagaaaaagatcctccgttaaacccgcccctccccggtggcgctgcgcttaccggggcccgcagtcccatcccgcatgtaggccgggtcaggcgcagccgccacccggcacaaaaacggctccctactcgtagccattgcccggcggcgctgacgcttgcgcgggcctacgagattgccgggcccgcagtcccatcccgcatgtaggccgggtcaggcgcagccgccacccggcacaaaaacgtctccctatccgttgccattgcccggcggcgctgacgcttgcgcgggcctacccccttaccggagcccgcagacatatcacgaatgtaggccgggtcaggcgcagccgccacccggcgcaaaaacggcgccctactcgtagccattgcccggcggcgctgacgcttgcgcgggcctacgagcttgccgggcccgcagtcccatcccgcatgtaggccaggtcaggcgcagccgccacccggcgcaaaaacggctccctatccgtcgtctcccccgctgcgaccgaaacttcacccaactgtaatctgaacgacatctccaccttctactgtctgggcaggacggaggaggagccactatgtttagtctcgacaacgtactcgatgacctgtggcctcaggcgaggcccgccccctggcaaaagaaactgttaaaaaagctattttatgaggaagagtttcaacaatttgccgaccgtcaccgccacctcaaggggcttgatacggtcgaacaggtgctggaatacctcaatatccgctgcgccatcccggcgcacgatctcgaacaaatccccgaatatggcccgctggtcattatcgccaaccaccccaccggcaccctcgacggcctggcgctcctgtatgcggtatcccgcgtgcgccgcgatgtcaaagtggtcaccaaccgcatgctcacccaccttgagcccctgagctcgctgtttatcccggtagataatattcatggccgcaccgctaaagcggcgctgcagcagatggaccagcagctgcaggccggcggggtgctgatcttcttcccggcgggggaagtctcccgcctcacccgtcgcggcatccgcgataaaaaatggcactccggctttattaagctggcggcaaaataccgtgccccgctgctgccggcgtggattaacgcccgcaacagcgccctgttttacgccagcacgctgatatcagacaacctgccgctgctcctgctgatgcagcagatgtttcgccggcgcaacagcagcctgccggtgcgtatcggccagcagatcccctggtcgaactggttcgatgcgcagtccagcgctcgcgagcttaccggccgctgctatcagcaccttgaacagctgcgcaaagggctgccggggcggtttaaaaccgaaagcgccatcgcccgtccggaagaccgggcgctgctcaaacgcgaactgcacaaggccgaatgcctgggccgcaccgccgatggcaaagtgatttacctctggcagcgcaacggccaggaggacgcgccgctgctgcgcgagctgggacgtctgcgggaaatcgccttccgcgcggtcggggaaggcagcggcaaaaggcgggatatcgacgggtatgacgacgactatctacatctgatcctgtgggatgaagaagacctcgagatcgtcggcgcttaccgctttatgccgacgaccatccagctggcaaagcgcggcctggaggggatctacagttacagtctgttccattacgacgggcggatggacgatgtcctgcagcacggcattgagctggggcgcagctttatccagccgcgctactgggggcgtcgcgggctggactacctgtggtccggcatcggcgcttatctggcgcgctatccgcactatcgctatctgtttggtccagtgtcgatttctggcggattgccgcccgccgcccgcgatctgctggtggcattctaccggctgtggttcccggcgacgcatccgctggcggagtcgcgtcgcccttatccggcgtcgctgcccgacgtgctggcgcagtttggcggggaggattacaacgacgacctggcccggctgaagtccctgctcggcaacctcggctgcgcgatccccccgctgtataagcagtactcggaagtgtgcgagccgggcggcgtgcagtttatcgatttcggcagcgacccggatttcaacaactgcgtggatggtctggtgctggtggatctcacctacctgaaggccaatcgctaccagcgctatattggcgcacatctgggtgcgcaaaaatcggcataaaagctttttcccggcttgcggctgatgccttaaccggctacaagccttaccccgcccggtaatacggcttatcgccgaggatcgtcgcccggtgcatgatccgccgctgcggcagatagtcggtgttggcgtaatgctgcgtcacccggttatcccagatagcgacatcgttcggctgccagcgccagcgcacctgaaactccggtttagtgacatgagcaaacaggaagttcagcagcgctgcgctctctttctcactcacctcgacaattcgcgtggtaaacccttcattaacgaacagcgcctgcttgccggtcaccgggtgggtacgcaccaccgggtgcagcagcggcggatgcttcgccaccgcttcctgccagcgccgatgctcggcttcggtcttgttgtacttatactcctggaacgatttgcggaaatcgtgttcggcatgcaggccgctcagcagctgccggaagggttctgacagcgcttcccaggcggcgatgccgctggtccacagggtgtccccgccggtcgtcggcagctctttcgccgccagaatggcgccggcgggcggcgtgtcgataaaggtgacatcggtatgccagttgtcattatccggcggattatcgttgtgggtatcgaggacgataatctcctccacccctggggcgtgagggtagaccggatggatatgcaggtcgccaaaacgcagcgccagatcgcgctgttgcgccggggtgatattctgctcgcgcaggaataccacctgatgacgcagcaccgcgtgatacagctgttcaaactggttgtcgctcagcggacgggttaaatctgccccgctcacctgcgcgccaatatagggccccagcggggtaatgctcagacgttcactcattgtacttctccatgccagggcgtcaggcgccgctgcagcgcgcgcagacccagttccagtaaaaaggcgataatggcaatcaccgcgatccccgccagcaccacatcggtggcgagaaactcgccggcagactgcaccataaatcctaatccgcgggtggcggcgatcagctcagcggccaccagcgttgaccagcccaccccgagaccaatgcgcagcccggtgaggatctccggcagcgcgccgggcaggatcaccagccacagcacctgcgcccggctggcgcccagcgaacgggcggcgcgaatccgcacctgctgcgcgctttttacccctgccagcgccgacatggctaccggcgcgaaaatcgccaggtagatcagcaggatcttcgaggtttcaccgatgccaaaccagatcaccatcagcggtaagtaggccagcggcggtaccggacgatagagttcgatcagcgggtcgaggatcccgcgcaccgtcgagttgagccccatggcgatccccaccggtacgccaataagcactgccgccagcagggcgataacgatccgcgtcaggctcgccgccaggtgctgccagagcgtcgcatccataaagccctgtggcccggcgatggtgataagcttctgcagcacctggcccggcggcggcagaaacagcgggctaatcagctgcagcgccgcgaccgcccaccagacggccagcaataccgccagggtcgccacgctgagggtgagctcacgggagagcggccagcgccacttcagcgtcgactgacgcggtttgtcgttcagtaccacgctcatgagaaagcctcccgttggtcaaacacccggctcagaatgtattcccgctgttcaataaagcgcgggtcggatttgatgctgcggcaggattcgcccgcgacaaagcgacggctgaaatcaagcggcagcctctccaccacccgtcccggccccggcgacagcagcaccagctcggtcgccatgaagatggcctcttcaatatcatgggtgatcagcagcacctgtttgccggtctcatgccacagtttcagcagcagcgtctgcatctgctcgcgggtaaaggcgtcaagcgcgccgaagggctcatccagcagcaacagctgcggattcgccgccagcgcccgggcgatgcccacccgctggcgttgaccgccggacagttgccagataaagcgcttttccgccccttcgagccccaccttcttcagcatctgcgccgccgcttgccggcgctgcgctttatccacgcccgccaactggaggcccagcgccacgttatcctgcacattgcgccacggcagcagaccttcattctggaagaccaccccgcgctctgcgcccggcccggtcacccgctgaccttcgagggtgatgctgccgtgctgatagggcacgaatccggcaatcaggttcagcagggtagttttaccgcagcccgaaggccccagcaccaccaacagctccccactctccagcgtcaggttgatatccgccagcgccggtttaccgccgtagtcggcggaaagatgcgagatttgcagcatcgccgcctcctttacttcacaaagcggtcagtaacgtactgacgataatcggttcccgccgcaggcactttgccctgctctttcaggaagcgcgcggtatcgacgatggcctgattgaccggcccgttcagcgcctgcgcctgctcagcggcggtgagataggtattgcccttcaccagcccggggacatcggcttccggcacgccgctcaggcgcgccagcttgctgatgttgtccggctgtttcagccatgcttccgggttggcgatgtagggctgctgggcgtcgatggcgcttttagcaaacgctttgacgatctccggatgctgctcggcgaagtccttacggaccacccagacgtcaagggtcggcgcgccccactccccaacctgagaagaatcggtcagcaccttgccctctttttccagttcgttaaccgctggcgcccagacgtaagcgccatcgatatccccgcgctgccaggcggcgataatcgccggcggctgcaggttaataatctgtacctggcccggcttgatgccccagtgtttgagcgccgacagcaggctatagtgggtggtggagataaacggcacggcgatgcgcttgccgatcagatcttccggtttggtaatgcttttcttcaccaccagcgcttcggagttgccgagctttgaggcaagcaggaacacttcaatcggcacctgctggctggcggccaccgccaacgggctggagccaatattaccgatctgcacatcgccggaggccagggcgcgtaccacgctggcgccgctgtcaaatttccgccagtcgacggtcgccccgctggttttggcgaaggtgttgtccgcctgggcgactttcgccggctcagcggaggtttgatacgccacggtaacgttgaccgcctgcgcctggaaggcggcaacagccagcgccgccagaagagtaattcgcgatgtgaatgccataatgtctgcttcccctgagttgttataggtgcagtatttccggcatcaggatggagatgaagtaattaaaaattctggctaatagcgaatcgtttttagaacaaaagcgggaaaggatagttggttttgtgcggtgagttagtggcagatggttggcgccgggcggcggctaggccttacccagcatccgtttcgcgcaatatgtaggccgggtaagcgcagcgccacccggcaaaaaacttagcgcttcgcgttaagcgcggcgatgtccttcggcgtggtgcggcagcagccgccgatcagcttcgccccggccgccagccactgcggcagataatccgcctggctggcgcaggcttcgccatgatggtgccaggtcttgctcaccgcatcataatgttcgccggaattaggatagaccaccagcggcagggccgtcaggctgtgcaaatgcgccagcgccgcgggcgtattttccagggcgatacagttgatccccaccgccaccacctgcgggttatccgccagggcggccatcacctcgcgcagcggcgtgccgtcgctgagatgttcggcgtcgcgcagcgtgaaggagtaccaggcgcgggcgcggggatactcctgcagcagggccgccagggcctggatctcagcgaatgacggcagggtttcacaggccagcaggtcggcgccggcatccagcagcgcttcgacgcgcgggcggtggaaggcctggaactctgccgcgctgcgctgataatcgccgcgatactccgagccgtcggcgagaaacgcgccatacggccccaccgaaccggccaccagcagcgtaccggcctgcgggttctcggcgaggtacgcctcgcgcgctttgcgcgccagctcgacgcttttgccgattagcgcccgggactgcgcctcatccagcccgcgcgcggcaaagcccgccggagtggcctgatagctggcggtgatcgccacctgcgccccggcgcgaaagtagtcaagatgcacatcgcggatcagctgcgggttctccagcagcactttcgccgaccacaggctgtcggccagatcgcagccgcgggcctccagctcggtggccatggcgccgtccagcagcacgaaaggctgggcgtcaagcagggcggtaaacggattagtctgcgacatgttggggctcctgagtcatattccgtgaacgagtaagataccaggcaccatagcacagggccacaaaggggatcccgcaccacagcgcaattctctggctcgggtcaaaagcgaggcccacgcaggccaccaggcacagcacaaagcccagaacgggcaccaccggataccagggagcgcgatactggagatcgctcagcgccttaccctgctgcagatggcggcggcggaacataaagtgcgaggcgcagatgctcaaccacactgccaccaccgcaaaaccggagatcgccgacagcgcgacaaacaccgtatctggcgccaccacgctggagaacagcgccagcacgccgcccagcatactcaccgacagggcggtcaccggcacgccccgtttattgactttggcaaagcaggccggcagcgtcttctcgttcgatagcgaccagagcatccgccccgaagcgtacaggccggagttagccgccgacaggatcgccgtcaggatcacgaagttgaacatgtccgccgcataagggatgcccaccttctcgaacaccagcacgaaggggcttttctccactcccgcctgctgcatcgggatcagcgccgccagcacaaacacggtgccgataaagaaaataatcagccgggcgatggtggtgcggatggcaaccggaataactttatgcgggttttccgtctctccggcggcaatgccgataagctccgtcccggagaaggcgaagttcaccgccaccatggtcatcaggatcggcaggccgccgtgcgggaaccagccttcggcggtgatattgcgcaggcccggcgccggggagccatcctgcatcggaatgatgccgaaaatggccgcgccgccgagaataataaacgcgacgatggtgatcactttcaccagcgagaaccagaactcgccttcggcgaagaagcgcgtcgaaatgatgttaaggccgaagatcactgcgcagaacaccacgcaccagatccagaccggcacctgcgggaaccagtactgcatgcagaatcccgccgcggtgaagctcgaccccagcgccaccgtccacgttagccagtagagccacgccacggtatagcccgtcgccgggccaagatagcgcgccgcgtaaacgtggaaggcgccggtctctggcatcgccaccgacagttcgccaaggcactgcatcaccagccagaccaccagggcgccaatcagatacgccagcagcgtcccggccgcgccggtggtggagatgatatagccggtattaaagaataagccggtgccaatcacgccgccgagcgacagcatgatcagatggcgcgttttcatggtgcgcttcagctgcccaccttgttgttgtgttgtgctttgcattttattttctcacgccagcccgcttgcccgggtcatgctgcgtataaacgtatagacatctaaacatccaaaagaagaagtgttataccgtgccgccgctgaaaaagcaaagccgctgcaccagggcgcgcgccgacagcgtgcagcctgccccatttttgcgcagcgccagcgggcgcgccacggactgacgccttatcgcggcagacaacgttctggcactctctttgcagcctgtcgttcagcacctttctatctggcgaggcaatacgtatgacagagcacaccaccaccttaaaaagaacgctcggcagttttcgtttatgggggatcgccgtcggactggtgatatccggggagtacttcggctggagctacggctggtcgcaggcgggcacgatggggtttatggtcgtcgccctggcgatcgccgccatgtactgcgcctttattttcagctttaccgagctgaccaccgccatcccgcacgctggcggccctttcgcctatgcctaccgcgccttcgggcccaccggcggctttatcgctggttttgccaccctgattgaattcgtcttcgccccgccggccatcgccatggccatcggggcctacctcaacgtgcagtttccggcgctggatccgaaatgggtcgcctgcggcgcctacgtgatctttatgacgctcaatattctcggcgtcggcatcgccgccaccttcgagctgatcgtcactctgctggccatcttcgagctgctggtgttcatgggcgtggtcgcccccggcttctcctggagccacttcaccactaacggctgggcgggcgcggacagcttcagcggcctggcgctgccggggatgttcgccgccattccgttcgccatctggttcttcctcgccattgagggggcctccatggcggccgaagaggccaaagatccgcagcgcaccattccccgcgccctgggcggcggcattctgacgctgacggtgctggcgatcggcgtgatggtcttcgccggcggcgtcggcgactggcgcgcgctgtccaatattaacgatccgctgccccaggcgatgaagacggtggtgggcaatggcagcggctggctgcatatgctggtgtggctggggctgtttggcctcgtcgcctccttccacggcatcattatgggctattcgcggcagatctactccctcgcccgcgccggctatctgcccgccgggctggcgaccctcaaccgccgcacccgcaccccgcatctggcgatcctcgccggcggggtggtcggtatcgccgcgatcttctccgactcgctgatcaccatcagcggcatgccgctgaccgcctgtatcgtcactatgtcggtatttggggctattgttatgtatatcacttccatggcggcgctgttcaaactgcgccgtagcgagccgaagctgatccgcccattccgcgccccgctctacccgctggcgccggcctttgccctcggcatggcggtgctctgcctggtggcgatggtctggtataacctgctgctggcgctgattttcgcggcgatgatgctcggcggctacctgtggttccgcaaaaccgcagcggcccgtgaacgggcgccagtggatcctcaactgcgcacggtctcctgaggaggcggcatgtataaaaccacgctatcgggccaggtatggcgctttgatagtctgaaaacgttgatggcgaaagcgtcgccagcccgctccggcgacgccctcgcagggattatcgccacctcagccgaagagcggatggcggcgaaaatggccctcgccgaggtgccgctgaccgacattctcgacaacccgcttatcccttacgagcaggacgaagtgactcgcctgatcctcgacacccatgatgcgcagggctttgccgccctgcgtcacctgacggtcggcgattttcgcgactggctgctggatgatgctaccgataccgccacgctgcagcgggtcgcccgcgccatcaccccggagatggcggcggcggtcagtaagctgatgcgcaatcaggatctgatccttgccgccagcaaatgccaggtggtgacgcgctttcgcaacaccatcggcctgcccggccacctcagcgtacgcctgcagcccaaccatcccaccgacgacctgaaaggcatcgccgccagtatgctcgacgggctgctgtacggcgccggggacgcggtgatcggcatcaacccggccagcgacagcttaccggtgctggcgcagctgaacgtcatgctggacgatattattcagcgcttcgccatccctacccagtcctgcattctgacccatgtgaccaatacgctgcagctgattgagcgcggcgcgccggtggatctggtgttccagtcggtggccggtaccgaagcggccaacagcggcttcggcatcaatcttgccatgctgcaggaggcccgcgaggcggccctcagcctcaggcgcggtaccctcggcaacaatgtgatgtattttgagaccggccaggggagctgcctgtcggccaacgcccaccacggcgtcgaccagcagacctgcgaggcgcgggcttacgccgtcgcccgccactttgaaccgctactggtcaataccgtggtcggttttatcggtccggagtatctctacgacggcaagcagattattcgcgccgggctggaggatcatttctgcggcaagctgatgggcctgccgatcggctgcgacgtctgctataccaaccacgcggaagcggatcaggatgatatggacaccctgctgaccttgctgtgcgccgccgggctcaccttcctgatcggtgtgcccggagcggacgatatcatgctcaattaccagagcacctcgttccatgacgcgctgtacgcccgtcgcctgctgggcttaaagcatgccccggagttcgccgactggctggcgaaaatgcaaattatcgatccgcatggcgcgctgcggctcaccgacgcccgtcatccactgctgtccgtcctgccgcaaggagcctctgtatgaaccgtcccgatgcctggaacccgctgcgtgaatttaccgatgcgcggatcgccctggggcgcagcggcgccagtctgccgacccgcgaagtcctcaactttggtctggcccatgccagagcgcgggatgccattcatcagccgttcgccagccaacaattggtggcgccgctggcggcgctcggcctcgaggccctgacggtgcacagcgccgcgccggaccgtcatacctatctgcggcgcccggatctcgggcggcagctcgccgatgagagtcgcgccgacctcgccgccagcggcgtccgccccgccgacctgctgctggtgatcggcgacggcctctcttcctgggcggtagagcgccaggcggtgccgttgatccgcgccctgctgccctatctgcggacgctgggtatcggcctggcgccggtggtgctggcgcatcagtcgcgggtggcgctgggggatgatattggcgaaaccctgaaagcccgcgcggtggcgatcctgattggcgaacgaccgggtctctcctcgccggacagcctcggcgtctacctcacctggcagcctcatcgtcagcgcctggagtctgagcgcaactgtatctccaatattcggccggagggattaagccatgacgccgccgcctttaaactggcctggctgctggagcaggcttttttgcgtcggcttaccggggtgggtctgaaagatgaaagcgataatccggcgctgcatggtaaaataaaaccgttgctccctttaaaataataagtcacgcgagcagcagaatagatttttaatattatcttgtgcacctgactttatattccgccgcgtgctgaaattgcccggcggcgcttcgctggcacgggtctacggaagccgtgccagcggtttatatggcgtatttttcaggccgggtaaggcgccagtcgccccccggcaaaatgctttcgccgtaccaaaaaccgtgttgtcgccagccttatgcccttccctgcaggtaataagaatattgcatgagtaaaaacgaaacggacgttgtaaggtaaatcagcgcattaaaaatacccgtcatacttcaagttgcatgtgcgttggctgcgttctctcccccagtcacttacttctgtaagcgtctggggactcgcttacttgccgccttcatgcgactcgaattatttagggtatatatctcgttatctattcaacataacagacaataattcgccggatacgctggcgcattattcctcaatgttatgcagtcattgatggttaaagataaataatcgaccgacggagaaataccaatgaaatcgttttccgggaaagcgtctttaatggccacgctggttgccgcgctggtcggcgccagcagcgcgcaggcagcggaaattaaaatcggggtggtattacccctgagcggcgccctcagcggctatggccagccgtcgcagaaagggctggacattattcaggccatcaccccaacgttaaaaaatggcgataccatcaagcttatcgttatcgatgataaaagcgacaaagtcgaagcggccaacgccatgcagcgcctggtctccagcgataaagtggatgccgtgatcggggaagtcacttcctccaacaccctggcgatgaccaaaatcgccgacgacagcaaaacgccgctggtctcctctaccgccaccaacgaccgcgtcacccgcaaccatccctacgtcagccgggtctgcttctcggacagcttccagggggtggtcggggccaatctggcctcccgcgatctgaaagccaaaaccgccgccatcgtgtttgacagcagcaacgactactccgtcggcctggcgaaagcgttccgcacccagttcctgaaaaacggcggcaccattcccatcgaggtccaggccccgggcggcagcaaggactttaaagcccagctggcgagcgtcaaggcgaagaatgtcgacatgatttacatgccgatctactacaccgaaggggcgctgattgccgtgcagtctaaacagctggggctcaacaaaccggtggtgggcggcgacggtctggccgcggatcaggtcttcttcgatgtcggtaaagacgcggtcaacggctatatgaccaccgattactactcgccgaacgccaaagagcagaccccggcgggggaaaccttcatcaaagcctgggaagccaaataccagcagccgacccatacctggggcgcaatggcggcggacgcctataacgtcatcgtcaacgccatgaaccagtgcagcgatccccacgatcgggtctgcgtaaatgaaaaaatccgcgccaccaaagatttccagggggtgaccggcacgctgacgttacagaacggcgacgccattcgcagcgcggtcatcaacgaagtgaaagatggcaagctggcgtttcgtaccgtggttaacccttaagttgtgacgaggctacaaaatggacggcgccatttttctccagcaagtggtcaatggaatgagtcttgggggcatgtacgccctgattgccatcggttatacgatggtttatggcgtgctgcggctgatcaacttcgcccatgcggacgtgatgatggtcggcgcgtttagtacgctgtttttattttcttcggttgggctacccttcggggtagccgttttcctgaccctcgggctgtgcggcctgtttggtatgctgattgaccgggtcgcctatcgtccgctgcgtcaggcctcgaaaatctccatgctgatcactgccatcggcgtcagcttctttctcgaaaacctgtttaacgtactgtttggcggcagctcgcgcttcttctccgcccctgactttttcaaccagactcgggccttcggcagcgtcatcattaccaacgtggcgtggattgtgccgctgatcaccgtcctgctgctgctggcgatcctctggctgctgtaccgcacccgctatgggatggcgatccgcgcggtggcctttgacgtcaacaccgtgcgcctgatgggcattgacgccaaccggatcatctccctggtcttcgccctcggcagtagtctcgcggcgctcggcggcgtgttctactccatcagctacccgacgatcgatcccctgatgggcgtgcttatcggcctgaaggccttcgccgccgccgtgctgggcgggatcggcagcgtcaccggcgcggtgctgggcggctttatcctcggttttaccgaggtggtcgccgtggcgatcttccccgaactgggcggctataaagacgctttcgccttcctgttcttgattctggtcctcttgttccgcccggtcggcattatgggcgacgaacgtctggaaaggagccgtttctgatgctcaacgcgacgacgaccgccggggcgcagctgcgcaacctggtcattattgtcatctgtatcgcgctgctggccggaatcaacgtggtttttaatgactacattgttcgtgtcatcagcaccatttttatctttatgatcctcgcggtcagctacaacctgatcaacggcgtgaccggccagctgtcgctggagccgaacggcttcgtggcggtgggcgcctacgtcaccgccctgctgatcctctccagcgacagcaaggtagacatgtttgaaatggccgcccccagcccgtggatcctcagcctgcacgcgggcttcctccctgccctgctgataagcggcctgtgcgcggcggcgctggcggtgtgcctcgccgtgccggtcttccgggtacgtggcgactacctggccattgtcaccctcggctttgggtttatcatcaagatcctcgccattaacaacccgcaaatcaccaacggcgccatcgggctgaacgatattccgcagcagccgcatctcctgttctggtgcgggctgttcgccctgctggccaccggcatgatcctccagctggtgtggtcgaagtatggccggatgatgaaagctattcgcgacgatgaagatgcggcgatcgccatgggggtcaacaccttccgcattaaaacctgcgccttcgccaccagcgccttcttcgaagggatcggcggcggtctgctggcttccctgctgaccaccatttccccagggctgttcgactttatgctcaccttccagctgctgattattatcgtcctcggcgggctcggcagcaccaccggcgccctgctcggcaccgtgctggtggtcggcagcggcgagtggctgcgcttcctcgatcagccgctgcagttcttcggtcacgatctcggcgcgtacccgggcctgcgaatggtggtcttctccctgctgttgctgattatcatgctcttcgcccgcgaggggctgctggggaaaaaagagatttggcagatgggaagaaggaacagcagctatggcggaaaataacgttatcctgcaggtgcaggacgtcaccatgcagttcggcggcctgcgggccatcgacaacgtcagcttccatgttgacgaggcggagatctttggccttatcggccctaacggcgcgggcaaaacgaccctgtttaacgtcattaccgccaactataaacccaccagcggcagcgtcaccctggcgggcacgtcgctgaaggggctgaagcccaaccaggtggtgaacgccgggatcgcccgcaccttccagaatatccgcctgtttaactccatgacggtgctggagaacgtgatggtcgggctcgaccgcgccagccgctactcgctgctggaggcggccctgcatattggtcgctactttccggccgagcgggcggcgaaagccaaagcgatggccatcctggaggatatcggcatcgcccacttcgcccatatgcaggccacaaacctaagctatggcaaccagcgcaaagtggagatcgcccgcgcgctggccaccgcgccgaagctgctcctgctcgatgagccggccgccgggatgaacccgaaggagaccgaggatctggcggagctgatcttccgcatgcgccatgactatcagctaagcgtcctgttaatcgagcacgatatgcccttcgtcaaccgcctgtgcgagcgggtgatggttctggagtacggtaagccgctgttcagcggcctgatggccgaggcgatccagcatccggacgtcatttccgcttatctgggagaagccaattatgcttaacgcccgggaactgaaggtcttttacggcgtgatccagggtctgaagggcgtcgatatcgatgtctatgaccgggaaatcgtcaccctgatcggcagcaatggcgccggtaaaacctccaccctgaacgggatcgtcaacctggtgcgctccagtgggcgcgtcagcttcctcaacgacgatatctcacgcagccagacccaccagatcgtgcgtcgcgggctggcgctggtgccggagggacggcgcgtctttaccaacctgaccatcgaagagaacctgcgcatgggcgcttacaataatctcgccggctacgcccgcctgcgcgatcgcatgtacgccctctttccgcggctcaaggagcggcgccatcagatggcgggcaccatgagcggcggcgagcagcagatgctggccatcgcccgggcgctgatgagcgagccggtgttattgatgctggatgaaccgagcctcgggctggcgccgaaaattgtcggcgagctgttcggcatcattaagcaactgcgcgaagagaatatgacggtgctgctggtggagcagaatgcgacggctgcgctggcgatcgccgatcgggcgtatgtcctggagaatggccggatcaccttgtcaggcgcggcgcgggagatgctgactaatccggaaattaagcggatgtatctggggggatagacatggtcaaaactgcctgggctgcggcggcgcctcctgcgaggccgcaacctcaggcagtctcttgctacacaaagcacacctcgttccagtaggcttctcgcgtcctgcgtcgctcagtatgtcttatcatgacggaaccaccgggtttccacgttgccaatgtccacgccgtagaggctggctaccggcaggatcgcctccatgacgcgctgggtatcctgctgtccggcttcaccgttggacaaaaaagccagccagcccgttaaccgttgccacaatgccactttcgttttctcctctgtcgggaagcgaatcgcctgggtctatttcaaccacagttggccgggcgcgggaaatattaattccgaatttgcaatcctggctggcgcatattacccccggtcctatcaccctctccctggccctctccctgagggagaggggaccgcccggcagtcgttgccgtcctcgtaaaacgccagcggcgcataaagaatacccataggtttgttaagttctttttggttatagataagaattttttcttctttgccgccgacgggcaatttgtgggagcgtgatgtccacaaaacaaaacagggattcaggggaaaaactatgcgcaataaaaccacaaaaatcgcactggcgctgggtatgctgctgctcgcctcgcaggcacaggcggaccagctggctgacatcaaagccgccggcgtcgtaaaagtcgccaccttcgacgccaacccgccgttcggctccgtggacgccaaaacccaccatatcgtcggctacgacgttgactttgcccaggcgctggcgaaagcgctcggcgtcaaactcgagctggtggccaccaacccggccaaccgtattccgctgctgcagtccggcaaagccgacctgatcgtcgccgacattaccatcaccccggagcgggcccaggttattgatttctcaacgccgtatttcgtcaccggccagcagttcctcgtgccggccggctctccggataagctcgatgagtacagcaaagcgcgcatcggcgcggtgaaaggcaccaccggcgaacaggccctgcaccagcgtttcccgcaggctcgcgtcctctcctatgacgatattccgctggccctgaccgccctgcgcaacggcaacgtccaggccatcactcaggacagcaccatcctcgccggtctgctggcggaagcgccggataaagccaagtttaaaattctgcccgacctgctcagcaaagaagagattggcgtgggcgtgaagaaaggcgaaccggccctgctgaaggccgtcaacgatgagctggtgaagctggagaaaaccggcgaagccgcgaaaatttacgatgtctggtttggccctgccaccaaaacgccgcagccgcgcgcctttaccatagaagcgaaataatatgttctcgggtttactctcctactccgcggctccggccgcggatttttcacgtctgcagcgcgccagcattacgttccgtgatgtggccaagcgctacggcgatcatcaggtacttaacgccatcaacctacaggtcgagcccggcgaagtagtggcgatcctcggcccttccggatcgggaaaatcgacgctgatccgcttgatcaaccagctcgaatccttaagcggcggcgagatcctgatcgacggcaaaccgaccagccggctgagcggcagcgccttgcgccagctgcgcagccgcgtcggctttgtcttccagcagttcaacctttatgcccacctgacggcgcaggagaacatcactctggcgctggagcgcgttcatggctgggaaaaaagcgaggctcaggcgcgggcgctggcgctgctgcgtcaggtgggactggaagaaaaagcgcagcagatgccggcgcagctctccggcggccagcagcagcgggtggccatcgcccgcgccctggcctcctcgccgcagattatcctgttcgatgagcccacctcggcgctcgacccggagatgatcggcgaagtgctgcaggtgatgaaaaccctcgcccacagcgggatcaccatgctggtggtgacccacgagatgcagtttgcccgcgaaattgccgaccgggtggtgtttatcgacggcggcgacatcctcgaagtcgccccgccggctgagtttttcgcccatccgcagcatgcccgcgcacggcgttttctgcagaaggtgctggatccgctgcaccaggagagcctcgagtgacgccgatgcttgactggcacggcgtcctgagcgggcaaccgttgcaatggattatctctggttttctcaccaccgtctgggtcagcgtcgccgggatcctgctcgccaccctgctggcggtcctgctgctggccctgcgcctcggcggcggacgcgcggggcgcggactggtggccgcgtgggtctcgttgtttcgcaataccccgctgctggtccagctgctgttctggtactttgccgcctggaacctgctgccgctggcggtgaaggaggtggtgaacgacgaacacgcctggtccattctgccgggcaacgtctggtggctgacgccggagttcctctgctcaatgtgggggctgggggtctttacctccgcctttctggtggaagagatcgcctccggactgcgcgccgtcagccacgggcagcgggaagccgcgctgtcgcagggctttacgccgtggcaggagctgcgctttatcctcctgccgcaggggctggccaacgcctggcagccgattgtcggccagtatcttaacctgatgaaactctcatcgctggccagcggcatcggctttgcggaactgacctatcaggtgcggcagattgagagctataacgcgcacgccctggaggcgtttgccgtcggcaccgcgctgtacctggcgctgggggtggcgatgggcgtggcgctcacgcgtctcggcccgggaagaaaactgcaacggagcgcccgacatgaacgctaatctggcggtgatcgccgataacctcgattacctgctgtggggccggctggcggagggccagcccggcggcgtggcgctgaccctgctgatggccatcggcgccaccctgctggcgctgccgggaggcattgcgctggcgggcctggcctggcgctacggcgggctggtgcggcgtctgctgtttctgtgggcggaaattatccgcggcatcccgctgatatttgtcatcttctggctgtggtatctgctgccgatgctgaccggcggcgatctgcccggcgcggtgaccgtgaccctggcgctggcgtggtttaccgccgcctcggtgatgcactcggtgctggccgggctgcagtcgctgccgaaaggacagtatgaggcggcgctgacccaggggttcgctcccgggcaaacgctgcgcctggtgctgctcccgcaggcgctgcgcaacgttcagccgtcgctggtggggatctttatcggcctgctgaaggacacgtcgctggcgtttatcgtcaacgtcccggagctgaccaccgtggccggccaggtcaacaaccgggtgcagatctatcccctggcgatcttcgtcttcaccggcgcggtgtactacctgctgtgctgcggtctgagcctgctggccagccggcgctttacccgccgcgcggccaccagataaggctcactccgcgggacggggcttcagcggacaggtatcgctgatcttaataaatttgtcgttatagaccagatagtggttccccggctggcgcagcgccggctggcgaaccacgtccccgggacgcagataccaggcgtccccctcctcttcggtcgaatcgcatccgggcttaatcagcagcttaaaccaggtattgccggtgttgctcaccgtcccggccaccttatcgaaagaccatttaaactgtacctcgcgcgggcgcaccaccagaatggtatccatcaccaccaccggctccatgctgacctcgccgccggtcgggctgcgcctcgtcaggttgcgggtggggatttcgtgaaacgagacccgatagtagcgctcgcggttatcccgcggcccatgatagtaaaatttaaaatactcgctctcacctgcctgcagcaccagctggcggggggcgaacagcagttcgccatccaccggccgggagcggacttcgctgccgcccgggcgatcgatggcgctgacggcgatgcggtacagccgcgcgcttttattgttgttgaccacccgtttgctggcgaaatccgcttcggcaggcagggaaaaggtcaggttaccgaccgagatcgcctgcgccagcggcgctgccagcaggcagcccaccgtcagcagggccttagttaatgttgcgccacgtcgcctggacatgaatctctcctgaagcgctgacttcgccaaaccagccgttatcgtctaccgtccgcagcgaaatggcgttatccatcggaatcgaaaatttcaccgtggtcttatccatctgccccacttcgccggagatatcggtccacggcgtggtcagccacagcgcatcggtcatatcccgccagctgtcatcgcacccggcatcgtaggtctgcgtcgtgccgctgcgggtgataaaagagagcgtcgccgggaacggcactttcgccgtaccgtcatcggagctgaagagacagtaggaacgcccgccaatcacctgcgccggtccggtcaccttgatcagcacttcatcggcggccgttttaccgctggtggtgacgatgtagccgaaatcgagcgccggttcgccgctgccgacatacccctcgcgcgacggcgccgaggtatattcgtcggagataatgctgatgctgaaatcacgaggcttgataatcagcgtgttggaggtggaaaactcataccagcctgactccggcgaggtggtgttctgaaagcgaaagttgaacagatccttggtgttgatatcgctgatcccgaggttcaccatctgtttaaagaagttgctggagaagaaaacatagatcgagtccgagctcttcatctcgttgaaggtgtagtaataggcggtattgctcaccggcttccaggagctgccgttgaggctgaactgcatatcgtacgccccgacggccgaggccagcgacgagttggcgatcgccgggaaaatatggatcgaggtgttgcttaagccgttggtctgcaaggtatagttgaccatcttacagcttaatcctgagcggctgccgatggtctgcgtccggcagtcggcgttcccttccccgagggtcggcacgccatcgctgttgataaacacctccgccagcgagtgggtattaatcaaccgcaggttcgcggctttggtgtgggtgacgttgcgcacataccagttgccggaggcctgatccttacagcgcgcgccgctgctggcatcgtagttcaccgaggtctgacaggcattgatggtcatcgtaaagctgccgccgaccggcatctgctgcagatattgatagaaggcgtccgacatcatgccgtgcatccacttcgcgccgccgctggtcaccgtcgcgccgtaaaacccgctggcgtcggtggtctgcggcaggatcaggctggtagccatatcgcagccggcgtaccagttgatgcagcgcaggccggttaaggggtgtgaaaccggtgagttttccagccacatatcaaacttccagttggcattgagcccggtgttatagccgttatcgatatagccgagactctgctgatagatggtccctgagccggtgtattttaagccggtccagcggttagcgccggtcatacgcggatccagcgccccgccgggggtgacgaaaaagttgtcgtcggagttgttttccacaaacacaaactcgcgcgccggcgcatccgaccaggtggtcttggtcaccgctgccctgagcgcggctaccggccagagcagcgcgaggatcgccagcgccatcagtgcattaactttcattctcttctcctgactgctgcaccgccgcccacgacgagaggccgctgcagaccacatccccgacccagacggcgccgcgcgcctggctgagctccagcgccacttcgcaggttttattgccgccgtagctgaaatcgatagtggggtatttcttatccacgtccatgacaaactcgccgttttcatcggtgcgggtacggccgatatggttgttaatccgcgcattcgccagcagcgtgccgtcttctgcacgaatacggccggagacggtgaccatctgcttcacctctggctcaatcaccgcgacgttgcccggataaagggtcagatgactcttgcgcccgctgacgatgtcgtagctgtcgagcgagtttttgctgttctgcagctccacctcatagcgaccatagggagagagcggcaggtagttacgcttgccgctgagcgggaagatccgcccgttaaccctggcgctaatctgaccatcgtcctccagcccggtgttgaaaatcaccccggcgttaccgtcggttcgtccgctggcggcgatgtttttgccctgccagccgacgctgccgctggcggtgaggttggtgttgacgtagccgtccgccgcgctgttgacgttcagcgtgccgctggcgtagcgggcgtcgaactgggcatacgcgccgccgctgagggttttgtcatccccggtatcgccggagatggcccgcgacagattggcgccgatggtgcgaatagtgccttcatcaaactgcttgcgcgctgagaggttagccatggtgtagccgttctgatgggtcatcccggcgctgaaccagttgcccagcggcagcgacagatcgagagcgatgtatttcccggtgttggcgctgctgtcgccattgttatagcgctggatccccgcccgcaggccgagcgagccaaaggcgccgctgtagaccgtctgatagtaatccgcggtgtagtaatggctgttgtagcgacggtcatcgttgtagctgacgctgaacgtccccagcttcgaccacagcgcgttcaggttgagggtgccgccgatcgcccggttgtcggcatcgctgcgccgcaattgatcgccaatgcgggttctctcctggttaacccacactgaactgaatcccccgggcaacgtggcgctgatgctgccgacgctgctccacgagctatcgctggccagcatattttgcagattaacgttgatcgactcgcccagcggtagcgtcaggcgggtttcccccaccgcctggttgtcgtagccatagcccgtagccgcccagctcagggtgctgagcgacccggaggccgaaaggcctgccagccaactctctttcgccggccgggtctttttcccgctctctgaccagcgatccatatgaaaactgccgccccatacctgccacgccagcggcgcgccggcgccgcgtccccggctgaacagcttattgacccgctgggtgcgtttgctgaccacccgaccattgacgatcacctccacttccacgtcgtaaataccgtacggcaggccgcgagtatccacttcatggttgcccatagcgaagttctggacgctcagcaaccgaccgtcacgggtgagatgcacctcgcccgccgccggcagaaaggcgatcaccggcgtggcggactggctgttgtcgaagacggtggagctggcctggttcccccaggaaaggccgtaaatcttaccggccgaaatagcggtcatcggtcccagggactgcaggttccaggtgtcaagcatcccgccggcaaagcggtggccggcgaaatcgcgctcatacatggccttatataattcactgtcctgctgaccgctgccgatgccgtacagcgagccgtcgagcaccacgtgatgctcccgcagcgccgtgacgttgttcagcgacaggtagctggaggtgttgctcccgccgttacgcatctggttgttatagacgccgaggttatagctcaggttgctgctgagggtgttcacgctggactgaccgatatcttcgctgcgcgagcgcaggacggtgcccagcgcctcgcgcttgaccaccagctgcagcagcagctggcgcaggctgagatccagctgtgcgctgtcggtcaggggaatggtgagcgcctcgctgaacggggcgttggccaggccgatcagctgctggcgggtctgttcgctgacgctggcgttaccttcgctctcctccagctggatctgccggacgcgcagctggccgccgtccagccagataaaggcgctgccgatccgctgatcgtcccgggtgctctggctgccggcgagatgaatatagagcgggacgctcatgccgtcctgcagcgcctggctgaaggcctgcggaataatcaccccgccaatctgctgcgcgcctgcggcggcagcgctgacgtcgggctgaacgaacaaaaagatcatgccgaaggcaagccgcgttttcagtcctggggtaatccatcgttgaggcatcgtcgttatccatctgcacagctgtctatttcacgggaacaaactgctcaccctgccaaagcgccacccgtccttttttatccgccgtgtccacgcgcgtaaaacggcgcgatttacccggcatcaggtagtaattctctttacattccttaccatcggcggccttcaggcaggggccgtaggcgaggatccgcagcgtcgcattcccggtgttggtcagagagccgttggcgtactgaaagcgatagttcacctgccggggcgccaccaccaggatggtgccgatgcgagcggaagcagtggccaccgcgctgcggttggcgttatcgcgttgggcatcgctgagcgcctgatcgaaccagacaatgcggtagtagcgctctttgtcatccgccgggcctttgtagaagaagcggatcacatcgctggcctgggcgggtagcagcaggctggcgggagtgagcaatacctcatccggtttgtccatcgggataacctgcccgccgtccagcggggaagagagccgttcgagatggatattgatcagtcgaccgctgtctgtgctgttcttgatcgttttgctcagcgtgctgctgccgctgttcataaaggatgaaatatcgccgacatccagcgcctgcgccggcgacaccccggcaagcagcagcccgagggccagaaggtgctttttcataacaattccgtccgtgaaaaaagcagggggagatccccctgctggtgcatcagaaggatcagctggtccaggtggcgtcgaactgtacgctgacgtcgccgctccagatcccttccggcagagtgctgtaatcggtcacggcggtggtgccgttggtggtgccgctgatgatggagaaagtgaaaccatcctgcgctgtggtacggccgctggcgttgtagccattagccagcgcgctgaggttgccgcccataatattgttggcggtatcgatcatcacggtatcgccagttttttccaccgcggcgccgttataatccacgcccacgctcagcgtggagccggaggtatccagctgggttaaggtgttggtgataagacgcgaggtcagcttaaaggcggtcgccgttgtgtccccctcaatcgccacgtcaaacagacctttctgcgagttaaagcctttaatgccttcggcgtactggaacgccaggctgccgagcggggtcacaaccagcttgctggtggtgtcttttttagcggtcgcagaccaggtcgctacagcctgagccgttacgtcagcagcctgcgccacgcccataccggtaaacgccgttaccagagctattgccagaaccttttttttcatcgctttttcatcctgagttgaattaaggacatgatgtcccggtgaaccatttaaaaaacagaattgcctgggtgttactgaactaacttatatattttggaatacagtttggcctcagcattacgccgatgggtatacactgtcttcacgctacaattttcaattctggcgatcgatttcggctgcatgccctgggcggtcatgcggataattttcatttcccgatctgtaattttatctttcttaatatctttgcggagaaacctgccattaattacataggccagttcttttcgaatatcgcgactcagaccaacatataccaccccgcgaatatcgctattgtaataccagtagttcgctaaggcctctgatttcctggccgcaatcaatacgacctgtttcccctttaccgcggatagccattcgctgtcgcgcctgataaattcgtttaatgaagccgtattgagattgataaacacaaaatcttttctgattttctccagtgagagataaattaattcgtcgatgtctacaatcagttcggacagtcctttatagaaataggagtcatcggcagaccaaatatacttatcggaacagcttttatattccatatagtttttaacctcatagtccttgaagtaatcatttttacaacgtcactgcttgccaggcctataaagtttactggcgtattcgtttcctttaataaatcgccattaaataagacacgcattacttatcaatattggataagcgggggattaaactataattattttctgcttggcgttgaatttaagttttttcctatggagtgtcaacatgcggaaaggcaatgaatttcgcgcccaggtcaatatttacaaaaactgaaaatatcaaatttttgagcgccagaaaaagacatttattttcataaggttattggtaatataaccgtcaattcttatctgcgctttatattatccaggatcttcgccctattatgttaggaatattcttaatggaactcttgaatggcttatcaaataaaccggatttagcacaaaagaaaggatataaatctacaaataaacaaaaaccaggatgattcaccaacacataagactcatgaatagattaacctgccgcacaaaatagttatgtatatgttaatacatgcgggatgatgaatgctaaacaaaggcagacgcattatctattcgattaaacagtcttcttcatcaagattaagcgaagattgccgaaggctgcctacgcctacgaaccggtctgtctccgcgccctccaaagcatagcggcttttcggcgcttcgccagccgccagcatgccgcacgcgttgagccgctggccgtcgctctttcacgccagttcacgctttgttcgcaataccgtcatcgaaatttcatataaagacctattaatagtggccagttaatgacgaacctggacactcttatgaacagctctcttgccgcggtggccgaaactgatttccagccgttcaccgatctcgctgccggccggcagcggaaggtcttaagcgtgcgtaatctgagtaaagcttatcaagcccagcacaaggtgctggacggcatcagctttgatctgcacgccggggaaatggtcggggtcattggccgctccggcgccggtaaatcgacgctcctgcatgtcctcaacggcacccacagcgccagcggcggagaaattcttagctacccggaagtcggtaccccgcacgatgtctcacagctgaaaggccgcgcgctcaatgcctggcgtagccactgcggaatgatttttcaggacttctgcctggtgccgcgcctcgacgtgctcaccaacgtcctgctgggccgcctcagccagacttcaaccctgaaatcgctgtttaaaatctttcccgcagccgaccgggcgcgcgccattgcgctgcttgagtggatgaacatgctgccgcacgcgctgcagcgggcggagaacctctccggcgggcagatgcagcgggtggcgatctgccgggcgctgatgcaaaaccccgggatcctgctggccgacgagcctgtcgcctcgctggatccgaaaaacactcagcgcatcatggatgtgctgcgcgagattagcgagcagggcatcagcgtgatggtaaacctgcattcggtggagctggtcagggcctactgcacccgggttatcggcgtcgccagcggccagcttatttttgacgatcacccctcccggctgacgcaggatgtgctgcagcggctgtacggcgatgaagttagccaattgcattaatttcactcacacgggcaacataatgaaaaaatatatgactggcgcagttcgtttatccgcaatggtcgcgggcatgatgatggcatggcaggcagcggcggcgcagccgaaagagctcaatctgggcattctcggcggccagaacgccacccagcaaatcggcgataaccagtgcgtgaaggccttcctcgataaagagctgaacgtggataccaaactgcgcaactcttccgactattccggggtgatccagggcctgctgggagggaaagttgacgtggtgctgagcatgtccccctcctcctacgcctcggtttatctcaataatccgaaagcggtggatatcgtcggcatcgccgtggacgacaaagatcagtctcgcggctatcactcagtggtgatcgtcaaagccgactccccctacaaaacgctggacgatttaaaaggcaaagccttcggcttcgccgatccggattccacttccgggtatctgatccctaaccatgcgtttaaagaaaaatttggcggtaacgccgacaataaatacaacaacaccttctccagcgtcaccttctccggcggccatgagcaggacatcctcggcgtgctgaatggccaattcgcgggcgcggtcacgtgggcctcgatggttggcgattacaacaccggctacactaccggcgcgttcaaccgcctgattcgcatggatcatccggatctgatgaagcagatccgcattatctggcaatcgccgctgatcccgaacggcccgatcctggtgagcaatgcgctgccggcggactttaaggcgaaggtcgtggcggcagtgaaaaagctggacaccgaggatcacgcctgctttatcaaagcgatgggcggtactcagcacatcggcccgggcagcgtggctgacttccagcagattattgatatgaaacgcgagctggtgagcgcgcgttaatcctgcctcaacgccgcctgcttgccccagggtaagcggcggcgctacgttgaagatccccgacgcatgaagacaacccacaccgaatttgaacgctattaccagcaggtacgctcgcggcaaaagcgcgatgccgtctgctggtcgctgctgctgctggcgctctattttgccgccggcagcgccgcggaatttaatctgctgactatctggcactcgctgccccacttctttgactatatggcagagaccattccgcccctgagtgccggcaacctgttcgccgatgtgcagaccaaagggtcgctggcctggtggggctatcgcctgccgatccagctgccgctgatctgggaaactctgcagctggcgctggcctcgaccctggtggcggtcgccatcgccacggttttcgcgtttcttgccgccaataacgcctggtccccggcgccggtgcgctttgccattcgcgtgctggtggcgtttttgcgcaccatgcccgagctggcgtgggcggtgatctttgtgatggcgttcggcatcggcgcgatcccgggctttctggcgctgatgctgcataccgtcggcagcctgaccaaactgttctacgaggcggtggaaagcgcgcaaaacaaaccggtacgcggcctggcggcctgcggcgcgtccccgctgcagaaaattcgcttcgccctctggccgcaggtgaaaccgctgtttctctcctatggctttatgcggcttgaaatcaacttccgctcgtcgaccattctcgggctggtgggcgcgggcggcatcggccaggagctgatgaccaacatcaagctcgaccgctacgatcaggtgagcatcaccctgctgctgatcattctggtggtgtcggcgctggacatgctgtccggtcgtctgcgcctgtgggttctggagggtaagaaatgagcgtctggcacatgcaaccggatctcgccgccagccggcggcagcataagcagctctatcaggtccaggggcgctacctgctctacgtcgggctggtggcgctagcctgcctgctctattacgtctggttttttctgcagtttggtatcagcggcgagcagctgaccaccggcctgcagcagattggccgctacctggcgcggatgttcgtctggcacgacttctggaactggccgttcggctattactttacgcaaatcggcgtcaccctggccatcgtcttcgccgggacgctgactgccacggtgctggcgctgctgctctccttcttcgccgcccgcaacatcatgcgcggcgtggtgctggggaccctcgccctgctgatgcgccgcctgtttgatgtgctgcgcgggatcgacatggctatctgggggttgatttttgtacgcgcggtaggcctcgggccgctggccggggtgctggcgatcatcatgcaggacaccggtctgctgggacggctgtacgcggaaggacacgaagccgtggaccgatctcccgggcgcgggctgaccgccgtgggcgcgaatggcctgcaaaagcatcgctttggcatttttacccagtcgttcccgaccttcctcgcgcttagcctgtatcagattgaatccaacacccgctccgcggcggtgctgggcttcgtcggcgccggcggtatcgggcttatctatgccgagaatatgcgtctgtggaactgggatgtggtgatgtttatcaccctgctgctggtggcggtggtaatgatcatggacaccctctccgcctggctgcgccgtcgttatatcggcggcgccgcggtgccgctgtatcagagcggacgctagcgcacatttgcgccgggtggcggcttcgccttatccggcctactcgttcggctccgactgtctgtaggcccggcaagcaacttggactgcgccgccgggcgatggcatcaggcacggagctgcttttatgccgggtggcggctgcgccttacccggcctacaaccccaaatcaccactggcgctggggctgctgaaactgccggtgctggcggcctcaacatcgctgagacgttcccggaaggccggggcagcccgcatggatgcgggctgagggccgtgttttgcagggacgctgcctcggcccgacccgaagcctgcagggataagtcgaaggcaccgcgcagcggcgatgttgctggccggagcccgggggtacagggggcggcggcgactggccgccccctgtgcgctcccagcgccatgactgccataacgcagacaattaaccgggagcgcaatcggcccggaagtaacatagaagctgtagccctgctaagcgcagcgcgggcagggacatttccgattgcgccgatatttcgccgggtggcggctgcgccttacccggcctacagggccctctcacaggctgacacatcgtaggcccggtaagcgcagcgccaccgggcgatgccatcaggcacggagccgctttatgccgggtggcggctgcgccttacccggcctactcgtccggctccgactgtctgtaggcccggcaagcaacggcgccgccgggcgatggcatcaggcacggagctgcgtttatgccgggtggcggctggcgccttacccgccctacagggtttatccggactgggacgactgaacccgcaggcctgtagaaaaatttatccgctccgctattccagccgccagctcagcaccggccagccgtatccggcaccggccgcctgcagctgcggacagggattgaccagccgcacgcgatccgcatgcaggcacagcggcagatcgttaatggaatcggtatagaacgtcacctcgccgtcatactgcggatgcgcctcgcgccactgcgccagacgcgccaccttcccctgctgatagctggggatcccggtgatttcaccgctgtagccgccgtcgaccatcgccacgtcaatacccagcgcctgatcgatctccagcgcggcggccaccgcctgcaccagcaggctaaccgaggcggagataatcagcatctgctctccctcggcccgcagacgacgaatgagctcccacgcctgcggatagacccggggcaggatcgcctcgcgcacgcagcgggccaccagcgcgtcaacgtccgacttcggtattccggccagcggcgcctggatcagggccacataatcggcgatattcatctctccccggtcataatccgccattagccgcgcctcgcgggcaagataccccttctgcgtcgccagcccttcgcgaaccataaactggctccagaccgtactgctatcgccctgtatcagggtgttatcgagatcaaaaatcgtcagcgtgttgcccatggtactttcccttactggtcaaaataaactgccgggagcatgcgtaaaaaagatgacaggaaaatgaaccggacgccgctgcgcccggctcgccatcagccggcgcggaccttcgcggtgcggaacaccagcacgatcccgccgacgatcgccatcataccgatcatcgccgccgccggcagccggttgcccagcagcagataatccagcagcgccgtgatcgctggcaccagataaaagaggctggtgacattgacgatatttcccgcgctcagcagacggtacagcagtagctgggcgaccaccgaaatcagcagtccgagaaacagcaccggaataatcaacccggcgttaacggtaaactggaagccgctgaccggggcaatcagcaggcacagccccagactaacggcatactgcagcggcaggacatccgccggcgcctgacggctgcgcttttgccacagcgcgccaaaggtcatcagcagcagcgccgccagcgcaaacaggatccccgccgtcgccatcggcgaggccgccaggctgcgccacaccagcagcaccagccccgccagggcaagcagcagtcctgacagccgccgcccctgcaggcggcgctccaccacgcaaagcgtaaggatgggctggatccccatgatggtggcgataagtcccggcgtcacgccgttggccatcgcctcgaagtaacagaccgaatagccgccaatcagcatcagaccggtggccgctgtttgcaggcgggtgcccggcgcgggcagccagcgccgacggacgatagccagcggcgccagcgcgaccagggcaaccagaaaacgaaagaccagcagcgccatcggcgaggcgttatccagtccccagcgggtgaagatggccgcgctgccccacagcagcacaaaaagggccgttgtcgcctgcgaggcgagcagagaatagcgaacgtgcatagcatgctccagaacgtcaaacacaaggtatcaagcgtcataccggcaggtaagcgcctgctaaagacggcgttaagcgccgaaaactacccggtctggagggggaggcggtgggcagagcgtggcgaagcgatgatgaggcgcagacgtcatccaccccgcgtcgaaagcggcgccgggcaaagtctcgctagagatggcgtaatgcgtcatggaatgcctcgtgaaatgttcctgtcagcatcctggcacagaccgttgcgaagtgacaactgccctttatggctgctccatcccgaggttgtttatttttaatcgtaaataaacgtaaaggcggcctcggcttattcagccgtggtttttaatcggctataaaacaaagcagtctgcttgctacttcgaaaataacgatatgaagccaaaactgacgcatgctctctttttaattccttttttgttgttggcaggatgctcctcctcaccgaaacaggcaaagaacacaaaatctcatgcggatatgaccattgatagcggatcggacgatctgatcccggtggtggcggccctgcatgatcagatgcacacctggcagggaaccccctatgaatggggcggtactgaacaaagcggcgtcgactgctcgggtttcgtctggcgcacgctgaaggatcgctttaacctgccgatggagcggatcaccacccgcgagctgctgcacatgggcgtgcgggtcaataagcgggatttacgtcccggcgatctggtgttcttccgcacccgggccgggatgcacgttggcttttacgataccgatcataatttccttcacgcctcgagcagccagggcgtgatgcgctcttcgctggacaacccttactgggaatcggcgttctatcaggcgcgtcgtctgccgaaggagtataacgcgcagatcaccatgaacagcgacaccctgcatctggcgaagaatcgccgctaaaaaaaagccgcagccagggctgcggcgggtggttctgcggttaatcagaactggtaggtcatacccagcgcgacgatgtcgtcatcgttgatgccgagtttgttatcgcttttcagctggttgattttgtaatccacgaaggcgttcatgtttttgttgaagtagtaggtcaggcccacgtcgatgtagttaaccagatcttcactccccaccccttcgatatccttccctttcgacagcacatagccgagggacggacgcagaccgaagtcgaactgatattgcgccaccgcttcaaagttctgcgctttgttggcaaagccgccgctgatcggggtcatcttgcgggtttcagagtacatggtcgccaggtagatattgttggcgtcatatttcaggccggtcgcccaggcttccgctttcgaaccctggccgcgggccagcaggttctgatcgttggtacggtcggagctggtgtaggctgcgctgacggcgaagtcgctgccgccgaaatcatagcttaacgaggtgccgacgccgtcgccgttctgtttcttcgcttcacggccttcgtttttaccctggtactgcagggtcagatccaggccatccaccagaccgaagaagtcggtgttgcggtaggtcgccaggccgctggcgcgcttggtcataaagttatcggtctgggcagaggaatcgccgccgaattccgggaacatatcggtccaggcttccacgtcgtacagggcgccaaggttacgaccgtaatcgaaggagccgtagttcttcagcttcacgccggcgaacgccagacgggttttctggctggagtcgctctcggttttgttaccggagaattcagattcccaacggccatagccggtcaggtcgtcgttaatctgcgtttcgcctttaataccgaaacgcacgtaggtctgatcgccatccttgctgtcatagtcgctgaaatagtgcatggctttgatcttgccgtacacatccagcttgttcgcgttcttattataaacttccgctgcctgcgtcgctgttgaagccacaaagcccatcatcattaatgccagagtactctttttcattattcagtcctggtgatttatttatacgcgctattcaattgcgggcgctcgcccatcaaaaactggaggttttttaacgccgggatattaaatatttatgacaagatggaactttttataaaaaagggtatttaaatgtatctgacatatttttgtcacattccctctccagaatgcccgatcccgcgcaataaaatggcgcgcccgccgccccgggtgttggcaagcgggccgactcctgctacaacatcagctcgatatcgatattccttttgaacggcagagaatcatgagtgaaagccagacgctggtggtaaaactgggcaccagtgttttaacaggcgggtcccgtcgcctgaaccgcgcccatatcgtcgagcttgtgcgccagtgcgcacagttgcacgccatgggacaccgtattgtcatcgtgacctccggggccattgccgccgggcgcgagcaccttggttacccggaactgcccgccaccatcgcctccaagcaactgctggcggcggtgggacaaagccgtctgatccagctgtgggaacagctgttttctatctatggcattcacgttggccagatgctgctgacccgcgccgacatggaagacagagaacggttcctaaacgcccgcgacactctgcgcgcgctgctggataacagcatcgtcccggtcattaacgaaaacgacgccgtcgccaccgcggaaatcaaagtgggcgataacgacaatctctccgcgctggccgcgatcctcgccggggcggataagctgctgctgttaaccgaccagccaggcctgttcaccgccgacccgcgcagcaacccgcaggcggagctgattaaagacgtttacggcatcgacgacgcgctgcgcgccatcgccggcgatagcgtctccggacttggcaccggcggcatgggcaccaagctgcaggccgcggacgtcgcctgccgggcggggattgataccatcatcgccgcaggcaaccgtccggacgtcatcggccatgcgatggcaggcctgccggtaggtacctgcttccacgcccaggagtctccgctggagaaccgtaagcgctggatcttcggcgcgccgccggcgggggaaatcaccgtcgatgcgggcgcgacccaggcgatcctcgaaagaggcagctcgctgttgccaaaagggatcaaaatcgtcagcggcaatttctcccgcggcgaagtgatccgcatccgcaatagcgaaggacgcgacatcgctcacggcgtcagccgctacaacagcgatgcgctgcgccttatcgccggccagcactcgcagcaaatcgatgccattctgggctatgaatacggcccggtggccgtccaccgcgatgatatgatcatccgttaaggagctgaaaatgctggaacaaatgggcattgccgccaaagcggcctcctggcagctggcgttactctccagccgggaaaagaatcaggtactggaaaagatcgccgattatctggaagcgcagaccgacgatattctgcgcgccaacgcggaagatttagccgaagctcgcgccaatggcctgagtgaagcgatgctcgatcgcctcgcgctgaccccggcgcgtctgagcggcatcgccagcgatgtgcgccaggtgtgcaatctggccgatccggtcggccaggtgatcgacggcgggctgctggacagcggtctgcgtattgaacgtcgccgcgtcccgctgggggtgattggcgtgatttatgaagcgcgtcctaacgtgacggtcgacgtcgcctccctgtgtctgaaaaccggcaacgcggcgatcctgcgcggcgggaaagagacctggcgcaccaacgccgccacggtgaaggtgatccagcaggcgctgcaggagtgcggtctgccggccgccgcggtacaggctatcgagagcccggatcgcgcgctggtgggcgaaatgctgaagatggataaatacatcgatatgctgatccctcgcggcggcgcgggcctgcacaagctgtgccgtgagcagtcaacgatcccggtgatcaccggtgggattggcgtgtgccatatcttcgttgatgaaaccgccgagatcgcccccgcgctgaagatcatcgtcaacgccaagacccagcggccgagcacctgcaataccgtggaaacgctgctggtgcaccgcaacatcgccgacaccttcctgccggcgttgagcaagcagatggccgagagcggcgtcaccctgcacgccgccccttccgccctccccgcgctgcaaaacggcccagcgaaggtcgagccggtgaaagcggagcagtatgacgacgagtatctgtcgctggatctgaacgtcaaagtggtggctgatatggacgaggctatcgcccatatccgcgaacatggcacccagcactccgacgccatcctgacccgcaccctgcgtaacgccaaccgctttatcaatgaagtggactcttccgcggtatatgtgaacgcctccacgcgcttcaccgacggcggccagttcggcctcggcgcggaagtggcggtcagcacccagaagctgcacgcccgcggcccgatggggctggaagcgttaaccacctataagtggattggtttcggcgacgataccattcgtgtgtaaatgagaacgggcgatgcaaaaataggcagttgattccactggctattgacgcatcgcccgctaagttctaaccttttgcctcgtgattcacgctcgtgaacacctcttgcagggccgatatagctcagttggtagagcagcgcattcgtaatgcgaaggtcgtaggttcgactcctattatcggcaccatttcaaactcttcccaagtctaccgaaatcaacttaaagcccgtatactgcggtttctggcccgtattttatctcctgttatcaacgggactcaaccggaatcaagttacagttgggggcataagtgggggcattctgtgttcggtccagggagatgcccccaatgaagttaaatgcgcggcaggtagatgctgctaaacccaaagagaaagcctacaagctggcagatggtgctggtttgtatcttgaggttgttccctctggttcacgatactggcggatgaaatatcgcttcaatggaaaagagaagcgtatggcttttggagtctatccagcagtgtcccttgcacaagcgagggcactgcgcgatgaagccaagaaaaaactggccgagggtatcgatccatcgtttgccaagaaagaagaaaagctggttcgggatgtgcggctccataatacatttcaggctgtggcgcttgaatggcacggaacgaaggtgagccgatggtcagagggttatgcctccgacattatcgaagctttcaataaagatattttcccctatatcggccagcagccggtgaatgaaatcaagccgctggttctgctgaatgtgctgcgtagaatggaaagccgtggcgcgacagaaaaggctaagaaggttcgccagcgctgcagtgaagtctttcgttacgccatcgttactggacgcgcggaatacaatcctgctgcagatctaaccagtgcgatgtcagggcatgaatcgaagcattatcccttccttaccgttgaggagttaccagacttctttaaagctctctctggctatacaggcagcccgttaattgttcttgccgcacgtttgctgatccttacgggagttcgtaccggcgagcttcgaggtgctttctggagtgagtttgatcttgaaaaagcggtgtgggaaattcccgcggagcgtatgaagatgaaacgccctcaccttgtccccctctctacccaagcgctggagatcgtacagcagctcaaagtgatgtctgggcaatatcctcttgtgtttccagggaggaatgatccccgcaaaacgatgagcgaagcgagtattaatcaggtgtttaagcggattgggtatacggggaaggtaacggggcatggtttccgtcacaccatgagcacaatcttacatgaggaaggatttaatactgcgtggattgagacccaacttgcgcacgtggacaagaacgcgattcgtgggacgtataaccatgcgttgtatctggaagggaggaaagagatgatgcagtggtatggggattacgtggatagttgcgagagtaacaattaagttagcgtataaataccgccccaaaaaagactaaaagaaatgctgtagctatatgttgcagcgttttttcacgtaacgcaggatttttgatcatgtttaggcataacaaggcctgaaaattgtcaatgcgcaatttaatgaattgtctgcttagcacaaagcggacgatcgtgaacaagaggcacaaattttccccaaatggaaccatcggagccgcaaagcggtgacgctcaccctgtaaggacgctacgttcaaaacaagcttaaaattccccatatccaaactgatccgtattaatgggcactgatcgctctcggccatcaacagctctggctccgccctcctgaagattatggtgtaaatacttggctgattgtcacctgggacggtctgacggtggctgaacgtattctggtctcaggctcctggtggctgaccgcgaatgccagcgtcatctacaccaatcctgaagggattgttccaggcgatctggaagaactcacttggctctcggtgcagcggcgaatgaagaacagaatctgaaccggccgggaaataaatggcaggacgggatttattaacagatcatcggtacagaaaaagctatttaaaaaaaaacgtcagaaccggagatattagcaagcgacagcgactgacagaataacgcatgtttgaattacatgcctgatcacggtacagcttaaaccgaaggttaccggcgtgcttcggacattctgattggtcatattgatgcgtcgggacgggaccaggattttctggtttaaccggtttttttctcgtcaggcatcacatcgagctccttatcaaataaattattggactgtctctggtactaggtgaatagatctttacgtatgatgaactcctcaagggacataatcagtatgttagaaaatcactaaaggtgaatggtccgctttatcgagatgcttacacttgatgccctctgctttttatctatgagcgccacatctatctttatccggctttattgtgtaagacgtttcctgttatgtttctattcatttggctcaactatttattccaaataaatcatcttaattaaaagcctgcaatgaaataaattacaagccttatccaccccaagtttattacaagcattactcctgtgagcatatacggtttttatttgcaagcctaatcttttggcaatgtttttcacgctggttccttttattgataaatttaaaacacatacctcccgaggggaaaggaccacctttttaaaatatccgcaatttttttcatttattaaaaatgtaaattttttaatattcattgatgtgaaatctttacttaaaatttctatagggtttataataaaattagcaggcgactcacaagaatgcatgcaaattatatttaatgataagttattcactaccataccttccaataaacaaacaacatcaatactatcatcgaaaaaaatagtatcacctgcactaaaatttagatgttttggattattgcgtttaattgtgcgaatttttttgcttttatagggcttcagtaaagaatccaaaccaacaaaaagataatgattattagtggctatgtaaaacatttttcaggctatcctgttacgtgtttattaaaatgattagtttgtaaattattttgtaaggaatctttctaagggaagaaagattcaagactgggttttctccatgcgtaattactctgaaaatcatcaatcatttgcatatatgtctaaaggttgtttttttaatttccgtctgaacccgaagttagtgtgataaagagatacgtacgcctttgaggccagttactttgtacaattcattttatttttgctgtaataaatactgattaactgaagcaaatccagcctgtgtcaaaaaacgtgatacacgcgctggaatgattttatcccgttctagccagataatccgatattttgtgttttccccgttttcccaatctggagcatttgatataccgaggggaattttcactctcaacaaacagtctagtaatattccgtacacctctttatcgggcaacaaatataaatcccacacatctgtcagttgctgtactttctttaaatttaaattaaaagaattcagttcacctttcagttgaacaggaacccctaactgaatcgacaaatacctgacggcagtaaagtgttgaatgccatcaatattgttccagtacaggcgacctggcatccaggaatattggctgaaaaacattttatatagtcgtaatctatgatggtcaaggtttttcctgagttggtcgacactaatcggtgtagctaattcccggctaaattccaacgcgaaatcatctagtgtggcaatatttatatcagagttattagacgaacttagccccccgacactggaaatgtcgcaccgataattttttattacggtattactgaccagaccatccagctgaggtatatggcgatggagcaaatcgtaatcaccattatgaccaggatgcagatagcatatatgattttcttcgtaattgagccatgtttgccatttaatgaccgaacgtagccatattgtattctgtatatgtggccttttagctttcaaaacgccataatggactcgccgacttaatgtagccggatagccaagggagtcccaaaaaccatcatgtatggagtgaatgatttttttccatataggtcggttaggtatgatatccattttatccattcagtttattctttttttaggctaactactgattttctatctggcaactcaatctttggagggttgtgcgatttatcaaaatcaatgccaactcagcgagttaattaataaatacagtgtcattttaggtttttctcgtttaagcaatagttgactaacttttgtgtatttaaatttatgcagagcgttttaataaccatctaaaatatttgtagtttcgatggtaattaacctttaaaatgcactggtagatatttttagttgttcggatacataatttcacatagctagacagtgatgtatatatttatttcctgcacaaccagaacctcaaggtgaatccgcctttcctgttctcatatttattgcaccgtaacatatatcacgccataggcttcgtaagcaccgggttttgccccagggagtacggtcaaccgcaccgatgccaagggatctactgatacataccgcttgacagataatttagtggtattcgaaacagaagaacgtcccacagtcatcagtccggtaacccctgggctgaaggttagtatttctttaccttctagtgactgtattgtgacagataaatctgcatctccatcgcataccagggtagttgggatagcaatagcaggtgactgtgtccccggttgaaagtcccctaaatcaacatttgatgccgtaatccagcactgaacaggttctgcttgcacttggtcagcccagtaggtggtcccgaccttagtaggattagtatctccgatgcttatccagatgccgacataaaccccgtctcttcttccgttgcagtaattttcggaatacggtctctgcatcggcgacatgggactcgttaatatatgcaacgagcttaagatagcagcagggccatttttcgggtacaaatactttactgtacctcgccatagggttcttattatatttgcactcatattcccggcactgcaggtaaagacatcaagagtcgtacgcgttagtccaatatcgtttggtggtgacacattcatcggttcagccaatgttggtatatcacttgtactcaaccatgccggaagttcagcactcgcaccacaagctattccccacgttagaactgctccccagcctctgaatatatacttagtcatccacttcatttctgtgccccttcttcgtaaaaatctgattttactcatccatgccatatcttggccaaaatacctgcaaggacagccaatgttttcttatgcatcaataatgctcgagaaccacttcctgatattttcgatagtttgttctttccaccttgttaacatttactcgttcatcaaagttaatgtctattctatcgatatcactgatggtatacggctgcgatactatatgaatgcagagaaaggtcgcgtctccattatcatccatggcctatgccatcttcttagtccctgccaggccgcaggacagcagctggaactttatcgttctacttatgttatgctcatattactggtaatctattttcaatgtggcaaccgcaaagaattctcccgtcgagagagttaccccactatgtttcactgggacagcccaaagttcgggtttgtcggggtacgtgaaattcatccaggtattgacagataatggagtcgcgtcgttgagtattttaatgcccagcgccggattatcggttccgagcaatgtaccgtcaaagctcgtactggaaccctgcatctgcaacttcattgcgcgggaagaagtatttttgcagtccagcgtataattcaccggcacacggtagtgatttccatcaacacgagtggccatcatttctccaaacgaaacgataatatcctcgttgttgttgatgatgcagggaggactcacgatattgaccttcaccagaaaagcggagttaggaactccagttgcctgagtcgacaatccactcaatatgttacacaacgcaaaaacaaccaaacgtcgtatcgttatcactcgcattaacccaacctcactcataactcagattaaaatccactaccgccatataactgcctgagttaagattggctaatgtccgttccggtataacggcataactcagggtgttttgttctggcctcaggaaaagcggtttccctttgcttcccagacgaacatcttctccctgcgcatctacaagccgtagacccaatccagagactccctccaccttcaccagttgtgggttatcgacatcacgcattgctcggaaactcaccgttactgctggttgatcttctgaccaggtgagagcgcctgtacgtttatcgcgaccaatgaccggactgcgcagacaatcttccagatgcaattcaatccagacaggttctccacgggagcctatcttctgcaagcgacctgttccaatctcgcccagcaggacatcctgatgcgcgcttgccatctcgagtcgacaggcgctttctgtcaacgccccatgtacaaatagtgtaccgctggagccttcaacatccccttttccctgtcccagggcatatactggtgacagtaaaaacaccattgctcccagtatcatcgggatcatcagcactcccctaacaaatatgcagtaatacttcagttcaacccctccgcatatcttccgttggcttatgccaaccttgtaggtcatgaccatatattgcccctcttcccataaatgacacctgttctgctaactttcactttgtcatgctttcgtcactgccttcaccgcacataagttgccagtacaactgaaattcagttgtggtcgaccaccataatcattaacgtaggtcagcacaggactattacccatctccgccacgctcacccgtagaggtaagctgctctttggcggcaccatcacaggctcgaagtttttgatacccaaaccgtcttttttagtggcagcatctaccaaagttatgtaatacgctgtcggattgatgactacatacttgtcgttttccttacgcaaggtcagttgctcctgcggtggcggtgcgtttttgaccatcgcaatagctgctgggcggtagaacagcttgatgcgcgtttgcaacgcaatttgtagcgtattcggcttgttactctttggcgggatttctcgcaggttgaagtaatagactgtctcacggtcctgcggcaggttttttgtcgctggcattccctggatttttacctggctcggcttacccggttcgatgcgttgcaccggaggaagtactgttagcggactctggattttattgccctgctcatcttcaatccagccctgtgctaaatacggtaactgtttgttctggttgctgatgttcaagctcaccgacttctggctgccgtcaaaaatcactcgagtgcggtccagcgcaatggccgcttgcgtattctggactatcatccctccgaaaagggcgatggtaaacaatgccctcgagaaggtgctgctgtgagaagtaattatcgtgttccgtaaattgttctgcattatttcttccccataacggaggcctgtgaatattgttagttaagatcttaagcagctctcgccacttcgcgacgcatggttgttatcacgcagccggcttaatatcgtcggcgccaggtatgcccccatcaagcggcttacacagtagtcgcaatgtattcatcaacatatctggttgcagaagtgcaggcatcctcacttcacactgtgctgagcctccccaatgcaccaccatggtttctccggcattaataccgcttaaataaacgtttccactatcattgacgatacccgtctcctgctttcgcttatttataacagtcgcaccgaacggtggttcactgccatcagccagctttatagctgccatcgctttagcgccagaaattacatcaaattttctgtaaccaatcgccccttcagtcagcgtagcctgtaccaccgacacagtggcttcaatgttgtcacccaactggttcaaatcaatgcttgccttgtttcggtaatagctgttaacgtcactaattaccgccttgccccaggcattggtacggctggtactgccatagccacggaccggtacgtccggaacaccttcagtatcaattagcatcctcgtcccccccatcattccagagcggtgcattgcaccgccttcggaagtgagagtgagtccgccctgcattgttaaaccgatggcactgtaacgaccatcctggtagctggcattggcactcatgcgtgccatgtcaccttcatggctgtaataaccgctcacgctcactcctctgctggagttccctgcactcaattgatagttgttgtgttcgtcaacacggtcgtaatatccaacccgatgggtattgtcgttatggctgaccatcgcgttgtagctaaccgtcgaactatcactccacggaattgacatggatacgtaagccccattatcttcggttccattgtactggttgcgataagccgataacgatatactcacaccacggaaccgtcctaaatcaaaataatgtgataaggtaatgttatagcggtctgtagttggccggtcccaataggtttctcggctaaagttgatatagctactgagttccaatttgcgaaaatgtttgtttaagttgacggtgtacatctctttgccattgccattgctgcgtgtaccataagatcgtgcgtccagatactcactcatggtcatgaagtcttgttctgaaaagcggtaacctgcaaaagttacctggctatcgtactcgtcgaagtttttcgaataactcagtcgataagaatccccattgagcgtaagatcttcccagggcagacgaacacgcgaatgtgttgcgtcaaatgacagcgctcccaggaacataagatcacgtccgatgcccagtgatagagcgttataatccccgcccctcagaattccaccatacaaagaccaaccgttactgatcccccaggataattcgccggtaccgaacatcggatcgcgtaaatgatgttgccaatctgatggttttcccatagttaatttgaatcgcaccgagcctggccgcgtcaggtatgggatattcgcagtattgactacaaactcctgcacaccaccgtcctgctcttccacccggacgttcagttcaccgctcacagcttcgttaatatcctgaatgcggaacggccccgaggccactgaggtctcgtaaagcactctcccctgctgactgataataacctttgcattagtcttcgctattcccgtaacttccggagcataaccacgcaagttaggtggcagcatattgtcatctgaaatcaaactcacaccggtaaagcgaaaactgtcaaacattcccgagtcaaggtagttttctcccagtgtcaactttgagtgcaaacccggtattgcccggtaagcgtagtaacgactcaagtcgaactgtttttgtgtcgactgttccgaaccgttgctatgatctaaattggcctgccagtcggctcgaaaacgccaactacctagatttcctcccgctgttccattaccactgagagcttgggtattgctgccctcactctgctggtgttgactgctggcgttgagattgtaatccagcaacaagcccgcaacgccttcatcccaccgtgacggagggtcccagttctcgtcggtgtattccaaatatgcctgcggtatactcaggtaaagagaggtcgttggaagatcgcctcgtatttccattcccttcacacttctcttgtccaggcatccccccttatgccaccaagcaaggtctttcagtaccccgggtttcagtccaagttgttcaaccagtttgggatttatgcaggcgcgactgccatttgggtcatcatccggctcataaaagggaatttcttgctccggtagagtattcttattgatatgaacaaccatgtcgtaggttccaggcatgatgtaaccacttcgcgaaaattggctcaaatcaatgttctttcggtcgcgaacatccaatacatctgtgttaaattgaatattatctgttgcataagccttcataactaaaggacttaatgaaacaaaaataaataatcctaacgaatgtacattcgcaatttttccaagagaacaaaacaccatgccattacctttccagtataaatagaactatagcacgaggcaaaataagcctgtcaggaaattaactagaaataatcaagtctaaatttaatgtgagaccagaaaattccagattttaatgtctgcctatcagtaatcaatctgatggcataatccaattgattatattctggactggaatctattaatggcatagacttccctggttctattacatgcccatgagtatcgataatttggagtgccacgccagtggcatcacctttaataccaaatgattttccatcacgctcaccatcaaaagtaacattgaatttttttaagctatcagctttattatatccagacatacagttagttaatttaattgagaaaaaccagctgcggcttgttccatgacgaacaagttcagacaaggataacatacccatgtcaatggtttgcttttgatttccaaaactaatagtgcatgcagtgtcaataatggctccttgcatgtttacccgtcccaatatgaaagagttttcttttgccaggacaaccccaaaaagggagataaacaggtaagaaaccattactaaagtagcgttgaacagccccataaatacactccatattttgtatatccttctaaaaatgcatgcgatttatcgcatgcatttacatgcacatagaagattaatatttacacaaaatatattttagttataggccagtgtgaaatcagttactgcctgaaattctccctcagtaacaacgttagttgagtcaccatcgccttgtaagtaagcagcaaaacttaacgtgttattaccgtcctgtaatacctgctctttagttggtacccccagcttgatgatttgaccatctgcctgagtaatggcaacactggcacctttagcagttccggtaatccccagaagaccattcttagctgcagactccatacccgtaaaggtaacctgaaccttatttttagttgcaggtgagccgaaagaacagttttccaggccaatggagaaattacgaggagtagatttccctccactgagtaaagcttcctttgagatctgccctaaatccacagtttgatcaatagattgtggagtaatagaacaaggagcatcaataatagagcctgtaaaggtaactttaccatgaccctggtctgctgcctgtgcgccagagacagtactaaatgccaaaactaatgccatcacaattttattcagtttcattttcactttttccttaataaaggtctgtcccacatattggtgaagctgccattatttcgatgccaaacatacagcgagaggatggtgaaaatgcatcttcctgcttgcaatgttatgacttccggcaactgcacaacatggtaaccaaaaaaaaacaaaatagcttaataatctatttaattggcaaaaattagataaaatcaccaaaacaacacaataaaaaacattttattagattaaaaaacttaatgttcgtaaatgattaaataaatactctcactaattttcgactaaattcacgtcagaaaaaaaactgctaaaaaccagttgacgggtagtttcttatccaataaattttacaacccttaacctaagatgaaccttatttttttggtttggattcagctcctgctccaaaaaagagagagtatccttatgaaatatataataaattttactatcactttcgatccggacagtagattattaaaacttagaaataaggaccaacttacgattgagttatccaagccagccactcgtttgttaatcgaactcataaaaaacaataaaaatgagatgacacgagagacgctcatcaagcacgtctgggaggattacggattctctccctctagtgcaaccttaagcaatcatattagtgagttgagaaaagctttcgaagcacttgggataaataaagatattttgatcacggtgccgagggttggttttaaaatggaggctgaaattcatcctgaaactaaaaacaaagagctagatacatcaactgacggctttggaaaaaatgatattacggaagactcagcagtccagaaaaaaatgataaaaaagactgtgggagcatacggcaaaaaggaactgcatcgtgtgttgaaaccaattctgacgctcatttttatcttgctttcaataattactataataactatattaacccgcgagagaaatgaagaaccaaaaccattaggcacaatgaataaatgcaagatttatgcgttgggagatgactttccggaccctgaattgttttctcatgcgcgaataatgctctctgatatagagatagattgcactaaggaaaatcgtgacatcttctttatggagtcactttctgccaatggattacgaaagacttcttttatggtagtttgtacaaaaaattccgagatgaactataaagcctgtcaaaattataaacggattgattaaaatatatgcgccgagtaattttttttgtgttcatacttatcgtcatttctgtctgtctgttcttattttcaatagataataacgcctgggatccatttcgctgcaatacccatttgagtgctgacgttgcaaaaaaaaatggcgacaggattgaattcaacataaatataaatgttgttgcatttcataaagaaaacagtgaagttatagtgaaaggtaccctgcaagataaagataaaagttacagcatatacaggaggatttttattcctcaaaaaccatcacctctaaaagattatagtgcaacagtgataacatgtgaaaagcgacatccaaaagataacgttcctgacatactttggcaaaattacgtattgccagaagtgcccggaattatgttctatatggaaataacacatttaaggaaaaacgctttgttttttaatggattagataaaccaatttttatttgtactatgcccgaatgataactcatcatcaataatgctagaccgaggaagtatccgtttagtcattcaggagctgcatgctgtcgatctgaatgcgcagatttagcccttgcggtgtgttttcttgtggttaagataccagccagacttaccgccgcagtattattttgaagaaattcctgaactaaatgtgcaagaaagaaaggggttgctcaagagatatgctacgtataagggcttagatttatcttcagaagatttacgttttttctctgatcttttatctggatatcctgagcaagttttatttgcggttgatagcatttcagatttaggtctttatgctgtaagaaaagattctcacttaataagggaatatgctgatgataaagcaaaagttatagttgaaagcttttctaatgatcagaaaaaactcgaatttctttacttcctttctaagtttgaatttataagctatgaatttttattttcattggtaaatgaagatgagttttacccaatcacgcaaggctttataagtatgtctgtttgcgatcaattaggtgttaataatgactatattagagtaaatcaagtaatacaggactatatttcaagaagtaagtttggcactacaagcgaatatgatactatcctaagtgaacatatcaagaaattcatagaggaatataccgatgataatagagatatatcagactattttttctcgttccaagaagcaatcaaggctggaaaggacgttgataatagagtattagttccgtcatattttgtaaagacaataaggtctttatacgaaaaaggcggctctgcgaattataaagaagctgtacgattgactgatcagatactttcgaattcccaatacatgcattcgagtgttatcaatcatatattattcatgaagtgtcaatcactcgctagactacatgatagagagttttttaatgcggttagggatgtctccgagcctgaatattcgttcttacatggtttttattacaggatcacgcgacagcgtccaaaagcaattgagagttatatgcgagtattacgccaaaggccaagtgattatcgttcaaaaagtgaattggttttgttgtatttacaaaatgacgagcatgagcttgctttaggattagcaaaagaagtttatgaaagacagaaaaataatccgaccaatgctaataattacttgaattgcctgttttacaaagatgatgctaatattgagcccggtttggtagaggaaattcttgaacggttgcattcgaatcaggctcaacgtgctcaagagatgtattgctcagctaaggcgaaagctcttgcaaaatttgagaataaagttgaagaggcttttgaactcatagagaaaggaattgtggatttcccggatattaaatatccctttctgacactctgtgacttagcaattcagtatagaagaattgataagcttgaatatgctctagatattcttgaaagaacagactcaccaaaatctcaaacatatggaagttttatacgatttaaagctatatggttaactttgacttctagatttgatgatgctgtctgtatttgcaaaaatgagttaacagaacttacatatgcagaagtggagcagtttattgaaaagctaaagcagtaccaagtaaaggtttgacattatgttaggtaaggaggctcactgacgtgagcctttttgccaagtatgagggcaacaaccatttaatacgtcacacactgtatttataaatctaattgaaaataactttggggatacttttggggatatctataaagcatataacatgtatttttatttaattcaatatgttaggtgttacgtattgttcctattatcgcaccacctcaatcaaaacgttacagaaaacgcttctttaaaagcctctctgggtttacaccagggttgctttccccggagaccgatgcacttaaattccatgctcttatcgctgagccaaggcatcaaaactaccatcacggtcagtgataaaagctcccgcgggctcagaagtatctcgattatccatggctcatagcaccttaacgtaagcggcaatgagcaatgccatcttaataatattttatatccagccctccctcttcaaaccgttaatccagtaatttcatctccagcgccctgctcatcgcttgagtgcgactattcactttaagcttcgcgtagatgtttttgatatgccatttgaccgtctcggcagaaatagcgagggagcgagcgatttctttgttcatctgaccttcagcaattagctgtaatatctgaaactcacgctcgctgagctcgccaggaatatcggggcttccactattaaacggtgttccgtctacaggcccgcgcttgtcggcccagggttcatgcactccccctttctctttgcaagccgaagaggattcattcataccgataagcaaaggttgcaaggtatcgccagcgtcaagaaagagacccgtgagatgctgttgttcagccagctgcacgactggctgaaatgtcgtgcgcgcagcggcagttttgccactgttccacaaggccaatgaccagagcgtacgcagacgcgctgcggttaacctgtccctccggctttcctgatcggagaccatctcagccagtaaaacgcaggcttgcggtgcctggcctctggcgagaagaagccggctgcggccaagggatgcagacataacgatggcgcgttggcagggatgttcggcatccattctgaagctggcggccatttgttcaagctgtcgctgcagttgctctgcgccggtgaaattgccgcgctgcagtcgcaccctcacctgctcggctaacaacatggcctggagccgttgccagccgcgagacaccgcaagacgctgcgcatgctccagcaatcgctcgccctcatagggcatatcgttatctaaggcctgacgcgcgagataggtatagcaacgactcagcgcgtcgggtggactgaatcggtcgatgaattcgagccggtcggctaacagatgctcgggcgagtcacccctctgacattcataggctatctccgccagcagcggcgccagcgtcgcgccactggtcgactgggtaccggtataacattcagcctggcgcaacgttttctctgcgtaccacccggcttttcccagatcgccctgacaaagatggcactgggcaataataaacgcgcgataaaccgaaacaaacagattatctaaaggactttccggagagggcatatgctgttgaacctccagcgcgtcgtgatagcgctggttaacaacatggcaatagctgagaatattgcatatcagaccatcaacccaggtgtcgccgcagggcacttcggccagcaacggctgaactatagccagactctccgggatgttttccgcaaaggcttcgcaaattgcccgcacaacgcgcaatttacaccaggtgctgcgggttaaatcctcacgatgatgaagtaccatctgatcgaggttatcaagcagctgcctcgactcatcaaagtggaaataatgcgccagtgcccaggccaggttaatttgcaggtcaatgcgcgacggatcggtgctgggcggtaaatgatgcatccatgagatcagagtatcgatatccccttcttccgccagtgactgagcgcttgcgccgtcctgcacggggctatgcaccggcttgcctgcgctgagcgcatggcgtaccgcctcagaccacagcttctgttcgacgaaccaatgactggctaattcatgcagctgtttgcggtcaatatcgttgttctgctgcagcatggtccgaagattttcctgcaacagaggatggtagcgaaaccagtagccttgttcgtcaagggctgacaaaaaaaggttgtgtcgctcaatccatgccagcatcgctttactatcatcacgtccagtcactgcattgcatagttcggcatttaaccgactgaggaaggacgttttcaccaggaaatcgagaacctcttccggcagcggatccagtaccacctctttcagatagcgggcaatggatcgtgttcctccatgcatattacgcaacagatgctcgggatcattctgtaattctgccgacaatgaagcgatcttcatgcccgcgatccagccctctgtcacggactgtagccgctgtgcatgatggttgctgaggggtagcgcaaccgtgcggctaaaatagtgttttgtttcttcgagcgtgaattgcaggtctcgatcatagatctccaccagttggtcctgggcctgcagctggctcagcgcaagattcgggtggaaacggctgccaatgatcaaatgcaaggcggcaggcgcatgcttgattaaataccccagcgcttcatagaccccacgatcgttaatcacgtggaagtcgtcgataatcaggtacacgtcatgcgggcagtagtgtagctggttaatgagcccggccagcagttgctcggagctggagagcttctgctcttccatgtcacgccagaaatcggcgtcccagtcagcatagagtggacgcaatgcttgcagcagataaggaataaactgccatacgtcatcatcatcctcatcgaggctcagccaggcaatacgttccccctgggcgaccatctgctgatgccattgcgccaacagcgtggttttgccaaatccagcgccggcgcagacgacgcccagccggcactgctgaacgggattaagaagctgaagaagccgggggcgctccagcaattgtatcgaggagcgaggcgggacgaatttggtcaggattaacggcaagcctcgcgtcagccgcaatggcccggagaccagtgagggtgattggcgaccttctaaatccaatggcttcatccggggtgtctactcgttttgtttttttttcaattgtacgccagccaccgggatgacatggggcaggcaaactttatggctacacaaaatttagaaagtttgacctcaagcatgaaaacccccacctaccccccccatgaaggtggcttcgcactccctttaaccgctcgtagattcattgcatgggtgtggccagggttattcgccctgtctgttggccccgcctgggtgacctatattgaggagaattaaacgatgctcagcaaacaggcgttattgcaggcttaccgcaagatgcgggagatcaggacctttgaagagcggttgcatcaggaaaataccagcggtgatattccgggcttcattcacctttataccggtgaggaggccatcgcggtgggggtctgcgaaaatttaacgagcgcagatttcattggttcaacacaccgtggacatggccactgtattgctaaaggttgtgacattcacggcatgatggccgaaatattcggtaaggacagcgggttatgtcgcggtaagggcgggtcgatgcacattgccgatctgtcgaaaggaatgctgggggcgaacgctatcgttgggggagcccctcccctggccatcggcgccgcgctaacggcaaagacgctaaaaaccggcaacgtcggtgtctcttttacgggcgatggtggttctaatcagggcctggtctttgaagccatcaatatggccgtcgtgctccagcttccagccgtctttattttcgagaataacggttacggcgaagggaccggccatgactacgccgtgggtgggcgtgatatcgcccggcgcgccgctggcttcggcctgccggcagtgaccgtcgatggcaccgatttctttgccgtttatgaggcaacctcagaggcggtcaagcgtgcgcgagaaggcggtggcccaagcgtcattgaggccaaagccttccgctggcatggtcattttgagggcgatcccgcgctataccgcgcggaaggtgaagtgcaacgcctgcgtgaacaacatgatccgctgaagattttcaccgctaaggtcaagcagcatatcacccaggaagaactggcggcgattgacgaggaagtagaagccctggtcaacgatgccgtattgaaggcccgcgccgctgcctacccggctccggaagacctgctgacagacgtgtacgtctcatactgagggtgataaccatgacaataaaaacctatcgtgaagcggtcaaggaagccctggctcaggaaatggagcgcgatgaacgcgtggtgctcatcggtgaagacttgcgtggcggtcatggcggaaatgcgcccgaagaggcgaagattgaagcctttggcggtgtactgggtgtcactaaagggctgtggacgcagttcggctccgatcgggtgatcgacacgcccattaccgagtcggccattatcggtatggcggccggcgccgcagcaacggggctgcggccagtcgcggaattgatgttcatggatttttttggtgtgagtcacgatgcactgtacaaccaggcggctaagttccgctacatgtttggtggcaaagccagagctccgctggtgatgcgagggatgatcggcgcggggttttctgccgcagcccagcattcacagtcaccctataatatctttgccaccacgcctggactgaaggtggtggtgccctcgacgccttatgacgtcaagggtctgttaatccagtccattcgcgacgacgacccggtggtattctgcgagcataaaatgctgtacgacctcaagggcgaggtaccggacgagatctataccatcccgctaggtgtagccaactacactcgcgaaggggaggacgtcaccatcattgcgttgtcggcaatggtacataaagcaaaccaggtggcggacaaactggccagagaggggatctcggtcgaggtggtcgacccgcgaaccatttcgccgctggatgaggaaggtattctggaatcggtggcgtccacggggcgggtcgtgattgtcgacgaatccgctgcacgcttcggttttgctcatgatgtcgcggcgctgattgcgtcccaggcattccatttcctcaaagcgcccgttctgctggtgacgccgccacacacgccggtcccgttctcccctgctctcgaaaaactctggatccctggcgttgaacgtatcgaagccgccgtccgtcaagtgctggaggattaacctatgagcgaaatcaagacgcttgaaatgccaaagtgggggctttccatggaggaaggcttgctcgctcgatgggcaatccaggagggtgacgatttcaccagagggcaggaaatctgtgagattgaaaccagtaaaatcgtcaatgtgctggaggccccctttgccggtacgttacgtcggatgctcgcccgcgagggtgagacgcttcaggtaggcgccgtgctggccctggcggctgacgcgtcggtcagcgatgctgaactggacgaatttgttgcccgcctggcgacggcgaaacccgcagccccaggcccggaggctgccgcgccggacgtagcggcacaggcaggcgataagccagcttccgttgtttcgccgccatccaacagccccgagccccctgttgggcagaccgtcatccccgtcagtctgcaaggtgtgaccgatgtgactcaggttaatgccacgccccatgcgttacgactgtctgcccgctggggtgtcgacctgaaaaaagtccgcggcagcgggcgcggggatcgtatctctgtttctgatctggaaagcgcgatcgttgccgccggcggtcgcctggcctctccgacgccccccgttcgtcgtagcaaagcgccccgctcgcatgccgatgacagccaggtatcggccaccccgctggcgcgccgcctggccggcaaactgggtatcaacttgcatgactgccgaagcagcggttcacgcggtcgggtaagtcgcgatgatgtgctggccgcggcgttgttactcgacgagcacccgcagaccagtcctgtgcaggagagtgccccggccccctttgagagcatcccgatgtccggtatgcggcgggctatcgcttctcgcctgcaaacgtccaagcaacagtctccccatttccgtttgagcgtcgatctcgatctggagcgactgttagcgttacgtcaggacattaaccgcgaagtacccggcgtcaagatttcggtgaatgacctgctggtgaaggcctgcgccctggcgctggtggccgtgcctgacgtcaatatccagtttgatgaagcggcacaaagtatccgccgctttacggatgccgacatttcggtggccgttgcgctgcctgccgggctaattacccctattgttcgctcggcgaaccggaaatcgatcagcgacatatcgaacgaaattcactcgctggtgaccagagccaaagcgggcacgctgaagccggaagagttccagggcgggacctttagcctgtcaaatctggggatgctcggcatccggcagtttgacgccatcatcaatccaccgcaaagcgcaatcctcgccattggcgccggcgaggtccgggcggtagtacgcgacgggcaaatcgtcgcgcgccagcaaatgacggtatcgctatcctgcgatcaccgggtcatcgatggcgcggcaggtgcggcttttctccgggaactcaagcgactgattgaaaccccgaccttgatgtttatccaggagacgagctatgcacgataaatacgatgtgctgatcatcggcgggggtcctgggggatacgttgccgccatccgtgccggccagctagggcttcgtaccgtattagtggaaaaacaacatctgggcggcatctgcctgaactggggatgcattccaaccaaggcgctgctgcatggcgctgaggttgcgcacactatcacccatgccagtcagctgggcatcagcgtgggcgaggtgaacgtcgatctgcaaaaactggtgcaatttagccgtaccgtatcgcaacagctcaccgctggggttgcgtacctgttgaagaaaaatggcgtgagggtgattgatggcaccgcgcggctgcgcggcaaggggcaaatcacggtcgaggatgcccgaggggagacgcgcgattaccgggccgatcacgtgatcctggcaaccggcgcccgaccacgcgcattgccaggcatagcgccagatggcgaacatatctggacctatttcgaggcgctgcggcctaagcttttacccaagtcgctcttaatcatcggttcaggggcgattggcgtcgagttcgccagcctttataacgatctgggctgtaaagtgacgctggtcgagctagcgtcgcagattttgccagtggaagatgccgaggtgtctgcagcagtgcgtaagtcattcgaaaaacgcggtattcagatccatacccagaccctggtgacgcaagtacagctcaccgataccggggtgcgctgcacactaaacaacaccggcggcgaatattctcaggatgtcgaacgtgtgctgctggcggttggcgtacagccgaatattgaagatctggggctggaagcactgggcgtcgagttagaccgcggttttatcaagacggacgcggcttgtcgcactaacgtattcgggctttatgccatcggcgatgtagccggcccgccgtgcctggcgcacaaggccagccacgaaggcgtgatctgcgttgagacactggccggtgtcgaaggcgcccaccctctcgatcgcgactatgtgcctggttgcacttatgcccggccccaggttgccagtctgggcctgacggaatcgacggccctggccaggggacggcccgtcaggatcggtaagttctcttatcagagcaatggtaaggcgctggccagcggcgagacagagggttttgtgaagacgattttcgatgctgaaaccggcgagttgctgggcgcgcatatggttggcgcacaggtcacggaacagatccagggctttggcatcgcccgtcacctggaggccacagacgaaagtctcctgtcgatgatctttgcgcatccgacactttccgaagcgatgcatgaatcaatcctcgcggcctgcgaccaaccgttgcatcaataaaaaataagggaggcgatagcgtcgtgatacggagtaagttgtccgttatccctcctgtattttccttaa

SEQ ID NO: 5337 - DNA, 4053 bp, Unknown
  gut microbiota DNA sequence
cctcaagaacgtaaattagccctggcgactcatcgtcgctgccgttgccttttatgtggaatattgcctatgcccgaacatgtgcatcatatcgttaaacgtctaatcctttatatttgcatttgtttactggccgggattggcatttccgggatgactgcgttttttcataccagcttcagtagtacttcctcaatattatttccgctgctgaccagtttcctgatggtttttcatattaccattgcctgttttatgggcatgaaatactggagcagcaagcggcgtctgtaccttactccagtctctttcgggtttgcctgctcagcgctgctgatgcttggcacgctcagcagctatccggactggcttacctgcaatccggccccggtcgttaatcaaaatgacgccgttatctattatttcttccgcaatataatgatggctgtgttattcatgtcatctattattttgtactattttcgccagcgcatcatgcattcgtggaaagcacacgttcttacatttacagcatgtatactttttacgttgaccattattgttttatcatggctatactccagccattcgccgtggctgagcgtcaattttatcgacgatctgagccatacctttaccccgttgtggcaaagtattatcggctggctgctgatggcagtttggttcatcacgctgattttattaattagcttgagtaaactgcgtaatattttttggttcagcggcgcttttttttgcagcgcttatttgttcacgcttttccagctgctctccaccgcaggggagctggatcagacctggtaccaggcgcgttttttcgaaacgctatgcaccttgttcctgattctggtgctactggttgacgtctttatcctctatcgcgagtctaaccacaaatatgtccattcgtatcagaattcgatccgcgacccgttgacccgcctctacaaccgcagctttttctacgacactcttaaccaacagctggcgaaggtgaatgcccagcatccgctgtcggtgctcatcagcgacctcgaccatttcaaacgcatcaacgatagctacggccatgtcgccggcgacaaagtgatccagttcgccgcctcggtgctggaaagccattcgcgggtagatgacgccgccgcacgcatcggcggtgaggaatttgctctgctgctggtcaacaccggtgaaaaagaagcgcaagcgatcgccgagcgtatccgcctggcggtcagtgccggggagagccatttaccggagcgaatgaccatcagcatgggggtgtataccacctacgacaatagcgtgacagcggaagcgtgcgttcagcgcgcggacgaagccatgtatgaagcaaagaataacggacgtaaccaggtgatcgtctggcatcggcagggagggtgaaaaaaggcccggattagcccgggccgcaaagaattaatctttagcctggagatcgaggatattttgttcaagtttacggattaagtggagcaaggtttccacttcctgcttcgagacccctgagaggatttcatcacgggtcttacctatcacctcttccatctcgttgatcagcggttcggctttttccgtcagcttgatgcgtttggcccgccgatcgcttgcgcaggtctggcgagaaatgagccctttctcctccagctgatcgagcgtacgcaccagcgacggctgttcaataccgatagctttcgccagctggatctgcgactgctcaggcggcagctggtggatgttatgcagcgtgacccagtgggtctgcgttaactccagaggtttcaggcgatggtcgattagcgcgcgccaaacgcgaactaaacgtgccagatcagaaccaagtggcgattccaatttcatctccttataattagcttgctaagttattatactgattttagaatagtgtgcagcatttgaattatcaaaacaaatgaattacttgattcaacaaaaaccaaaacaatgatttacactgttaaagagtagcacgtcctgaggttacccctgtaatggcaaaggatttttgcttgtgaaactgagtcttaacacatccggattgccgctgcaggacctggtgttcggcgcatccgtctatttccctccgctgttcaaagccgtcttgttgggtttctttatctggttgtttttacatcgccagctgcgtgactggatgtatgcgggcgacatctggcacccgctactaatggatctctccctgttcgcgctctcggtctgtctggccctggtattactcattgcctggtgatctccctgttatgaaaagattaaaatatctgtcaacgctgctggtcgcggccgtcgccctgattgccgcatggttgttatggaatttctacactcagtcaccctggacccgcgacggcaaagtgcgcgccgagcaggttgggatcacccctcaggtctccggcagtattctgcagttgaacgtaaccgataaccaacgggtcaaagccggggaagtattgtttaccatcgacgacaccccctatcgcatcgcggtgctgaacgcccaggcgcagctggcgaaagcccaggcggaggtggcgaaagcgcaggcggagcaaagcaaggccgccagcgaggctcgccgtcgccgaagcctgtcgcaaaatgccatctcggctgaagaccttgagaacgtcaataccgccctgaataccgccaccaccaccctggctgccgccagagcgggggtcggcgtaaccgaagcggcgctgaaacatgcgcagtggcagctcagccagacggttgtcaaagcgccggtggatggctgggtgaccaacctttccacccgcgtcggtgattacgctaccaccggccatccggtctttgccctggtggacagccactcgttttacgtgctgggctacttcgaagagaccaaactgcgccacattcgcatcggcgatccggcacaaattattctctatagcaatcagcagacgctaaagggccatgtcgcgagcatcggccgcgcgattgtcgaccagagcgtggaacagggaaccgggctggtggccaacatcaaaccaaatatcccctgggttcgtctcgcccaacgcgttccggtgcgaattgcctttgatacgctgccggccgatgtcaccctggtctccggcaccacctgcactgtctcaattggcgggcagtaatgaacctgcagaccctgtcgtggcgcgcactcccctgggttaaagccacccggccgcagtggcggtacgcattgcgcaacggcatcgcgatgtgtcttgcgctgagtatcgcctatgcgctggatcttgatgagccctactgggcgatgacgtccgcggcggtggtcagctttcccaccgtcggcggcgtgatcagtaaaagttttggccgcatcgcaggcagcctgctcggcgcctgcgccgccctgctgcttgccggtcatacactcaacgatccctggctgtttctgttcagtatctccggctggctggcgctctgcacctgggcctgcgccctgttcaccaacaacgtcgcttatgcctttcagctggcgggctatacctgcgccatcatcgcctttccggtgattaacatcagcgacagctacgagctgtgggtcatcgcccagtcgcgcgtctgcgaagtcatcgtcgggatcctctgcggcgggctaatgatgatgatcctgccaagcacctccgacggcagcaacctgctgacggccctgaaaaccatgcacgcccggctgctggagcacgccagcctgctgtgggtgccggagacgacggatgccattcgcaccgcccatgagagcgtgattggccagatcctgaccatgaacctgctgcgtatccaggccttctggagccactaccgtttccgtcggcagaatcctctgctgaactacctcctgcatcagcagctcagaatgaccagcgtcatctccagtctgcgacggatgctgctgaactggcctgacgcgccggcgaatactcgccaggtactggagtc

SEQ ID NO: 5338 - DNA, 153325 bp, Unknown
  gut microbiota DNA sequence
aaaggcgcgcgccagatgtccttcgcggccgcggctgcgggggttgtagaaacagataacgaagtccgcttccccggcggcgactatgcgtttttcaatcaccggccagggcgtcagcagatcgctaaggctgatatggcagaaatcatgcatcagcggcgcgccgagcagcgaggcggcggcgatactggccgtcatccctgggatcagacggacctcaatgtccagctgctgcttattaaccagctccagcaccagccccgccatgccgtagatgccggcgtcgccgctgctgatcagcgcaacgttgtgcccggcctgcgccagctcgatggccgcctggcagcgctcaatctctttgcacatgccggttttgatcacctgcttgtcgccggtaaaggcttttaccaggtgggtgtaggtcttgtagcccaccacgatctctgccgcctgcagggcctccacggcttccatggtcatcatcgcctgcgagccagggccaattccgattacgtttaacatcagtgtgttactcccaaagtaatggtcacgccctgctcacgcagggtttcgccggacaggtttccctgactcagcagccaggccaccgggccggagacgctgccgacgccgaccgtctcccggacaaaagacgaggccggaaagcggtgctcgtgctcgcgcagcgcctcggcgctgaaggtttcgaacggcacccggcagcggtgagccagctggcgcaaccccggctcgtttgccttcaggctcacgctgccgatcgctttcagcgccagcgggtcaagacgctgagcggcaagctggcgatccagcaacgtacagagcagcgcgcagggggtgtcgcgccgacagccgatccccgccaccacccgctggggcaccagcttccagtgaggcaccggcagcggcggcagcgaccggcgcagggtgacgcagatcagggcgtcgagcgccggcaagctcgccaggtcgcttaccgggataaacccgcgccggtcgcagcggcttagcgccccgatgaattcgccgtcgcaccacagccccacccgcttaccgctcaccagcatctggttaacggttttcaccgccgcgcgaaaatcggtcatccgggcgttcagctggaaggccagcgtgtcgagggcggccagctcgttgacgtcggtggcggtggtgatcaccgggtcggcgtcgagcatcccggcgagatagcgggttagcgcattggcccccccggcatggccggagagcaagctgatgacgtgccgggcgcgctcatcaatcaccaccaccgccgggtcgctgagcttgtcattcaccagtggggccagcacccgcacggcaatcccggtggcgccgataaaaatcaacgccgagaagctgctgaacgcctcgcgggcagcgctggcaaagccgccgttgaaggggataaacccctcttcctgcagcgcttcgctggtgtaacaggtaagcggcagcatggccgccagccgttttgccagccgcacgccgccgggcgtcaggcaaaacagggcaatggattcaggctttacggtattcatggctaaaatccgctgcgtacagttttgagtagtgatactcatcgccgaggaaggggccgaccaggatcagcgccgttttgcggatcccggcgtcgcgtactttgtcgccgatgtccgcgagggtaccgcggacggtctggctttccggccaggtggccttgtagatcaccgcgaccggggtggtcgcggggtagccgccctccaccagccgctccgccacccggtgaatacgttgcaccgacaggtaaatcgccatcgaggtttgatggctggcaaaggcttccagctgttcgcgcgcgggaaccggcgtgcgcccttccagacgggtaataatcagactctgcgagacttcgggtaccgtgtactccacccccagctccgccgccgcgccgaggaaagcgctgacgcccggcaccacctgccagcggatcccgcggcgggtcagctcttcgccctgctcgcgcaccgagccatatagcgagacgtcgcccgtctgcagacgcaccaccgtttttcccgccttcacccccgcctccatcaggtcgaggatctgctccagatgcagcgcggcgctgtcgtggcactccgcctgtggcggacagtaggccagtagctcggtgttgatcagcgacccggcgtagatcactacctgcgcctgctgtagcagacggtagcctttgagagtaatcagttcgcgatcgcccggaccggcgccgacgaaccacacgcaatggggatcaaaagtctcagccatggttttcttccttctgacaggcgatgacaaaaacgggattatggggtttgaagtagtggccgctgcccagggtagccagggtggagaccgccagctgctggcagtccacctcgtggatgccgctctgccgcaggtgcgccagggcgctatgaaggttttcctgcaaaataaaagtcatcaccagccggccgccaggatgcagctgcgccagcgaccagtcgatcagcgccgtcaggtggccgccgctgccccccataaagatcgcgtcggctttgtcggcgaccgccagcggcgcaacgcccgccacgatagcgatgttgtcgcagccaaagcgctgccggttctccgccagcaggcgcagcgcgtcggcctgacgctcaatcgccgtcacccgcagcgccgggttctgtagagcagcctcaatgctgacgctgccggtgcccgcgccgatatcaatcagatggcgcgcccggtgcagctccagcttcgccagcgccagcgcgcgcacggcctctttggtcatcggcacctgggcgccgcgcaaaaacagctcatctttcatcgaggatcaccaccgcattcatctcatattcgtcctccacggcgctgaccggcagccagtggatccgctcgttttccatcgccagattctcgcctatcaccatccagcgatggcctttgccgcgggccatcagctgggcggctatctcccgcggtccgcagcggccgtcggtcaccatggcgactttccggtgggcggccagagcatcgaagctcaccgcccggccatggctgctggtcagccacatatcgttcatgtcgatgcccgcccgggcgcagaggtactgcaccgcgctgatgccggggatcacctgcactcgttcccggccaaaatgggcaatcagccgggtgccaatgccatagaacagcgggtcgccagaggccagcaccacgacgcggcgcccggtatgggcctcaatccacgccagcagcgccggcatatcggcccccagcgcgaagcgctcgccggcgaagtcgggaaactgctggagatggcggctgccgcccaccagcgcctcagcggcggcgattgcctcgcgcgcggccgggatcagccactgcagccccgccgggcccattcccacgaccgtcaacatgtcagctcccgggcaatcgcctccagcggacggctgctgcccagtacctggttatcaaaagaaaacagaaccgcgtcgcaggtgggcggttgctgagtgaagcgcagcatctcaagaacacgctggcagattcgctcagccagatggttatagaggcgctggtatccccaggcgtcgatatgctccattgccgcttcggtagtgtcgcactcgctgaccagcgtcagcagcggcagcggcgcgccaagcagcgccagatgagcgacgagagtttccatccgcgcatcggcgatatggctgtgggtatgaaagatcccggcggcgattttgatcagtttgccgggatggccaatgagcacaatctggcggaaaccgagccgaaccgcctcttcaatcatgtagccgacgaagttgctcatggtgaccaccatctgcgggtcgatgcccatctgctcgcggacaaagcgctcaccgtggttgcccggcaccagcaccacgcgctccagcccggcggcgcgttttatctccagctcgagggagagcgagcgcttccagctctcttccgacatcggggtaacgatccccgtggtgccgataatcgagatcccgccgaggatccccagccgggcgttataggttttttgcgcgcgaagtacgccttccggagcaaaaatctccacctgcgcgccgcgggtaggacctatcgcttcgcgcacggcggtctcgatggtgtgccgcggagtgcggtttatcgccgggctgcctgtcggcaggccgatccctttgcgggtcaccgtgccgataccctccccgccctgcaggctaatctctccgctgtcattgagggtgacccgggcaaaaatcagcatgccgtgggtggcgtcgacatcatcgccgccgtctttacggatcgcggcgaccgcctgctgcccttcgacgtgcggggactcaacgttcaggcacagggtgacgccggagggggtgacgatcgagacctgatgaatcagatgctggcgcatcaccatcagcgccgccacttttgccgccgctgtggcgcaggagccggtggtgtagcccttgcgcagcgctttgccgtgatgccacaccggggcgtcaaaggtctgatcgctcattgcgcctcccgcaggtggtaaagcagagcgttcacaatcgctgccgccacgttgcttccccctttgcggccgagcgcggcgatggccggcaggccgctctcgctgagcgccgctttcgactccgccgcgccgacgaacccgaccggcacccccaccacgccgccgatggcggtctcgcgatgttccagcaggcgaaacagcgcggttggcgcattgccgaagacgaacactttctccccgggctcctgcaccgcaatatccaccgccgccatcgagcgggtcatcccccggctttgcgcctcgcgcaccacccgcgggtcgctgatatagcagcggcattcgccgccaaagcgggccagcagggttttgttgatcccggacagcgccatggtggtatcggtatacagcgtgcagggccggctcaaggcctcactcagcgcgatcagggcatccggagaaaaccacagaatatccagccagtcgaagtcagcggtggtgtggatcacccgcttgataatcgcctcgtgcagcgggctggcgaaacggtagtccggtcgcgtttcggcgatgatctcgctgatgatgtcgaagcttttcgcctcgatcgcctgcggttgttggatgtactgcatcaggttctcctcaggccgcgccgaccagccagtagcgcacgccgataaacagcgccagcgccaggcttgacgccacccacattaatcgaatggttcgggaaatatcgtccaccgcgatgtcgcggacggcgtcgcctatccagggcttttcaacgcgctggccgaagtaatcgttcgggccgccaaggcggatccccagcgcgccggcgacggtcgcttccggccaggcgcagttaggactgctgtgctgatagcgatcgcgccagcccgtacgcagcgcccgggcgccatcttcccggcatagcaccgcggcaaggctgagcagcagccagctcagccgggcgggaaggaagttggctacatcatcaagacgagcgctgaccatgccgatcgcccggtatttttcgtgtttatagccgaccatggaatcgagggtgttgaccgctttataggccatggccagcggcgcgccgccgaggagcaggaaaaagagcggcgcgataataccatccaccgtgttctccgccacggtctccaccaccgcacggttgatctgcgctggctggagctgagaggtatcgcgcccgacaatccaggagagcttatgccggctttcggcgagatctccggcctgcagcggccgggccaccgccatcgccgactgtgccagacagcgtcccgccagcgcggtgaagatcatccacacttccaccagccatccaagccaggggtggatcccgtgcgccagcgccagtacgccccaggcaacgccccatgtcaggccgatcaccaccagccacatcaccccgccgccgatgcgcagcgcccggtcgctatggcagacgcgtcgcactacacgctggctgacggcgatcaggcgacctatccagcgcaccggatgcggccagtgcggcggatcgccaatgacgacatcaagtatccaggctacacaccaggcgagaagggtcatagcgccctccttgctgcctgcagccagtggttgagcatggtcgggcgctgggcaaaatggacatggagatagctggcaaaggcgctgccggactgccatcctccctgccactgctggagcgtcttaccgtctcgctgtttacggcaggccagtacggcgggagtggcgggagaaaaatcggagtaatgaaattcatggccgcgcagccactcgccaggggctgccagcagcgtctgctgctgcgcctgcgcttcgcagtagccgaaccgggtcagacgcgtccccattcggctgtgtccgggaataatatccgccatcgtgtagcgctcgccgctggtgacttccagggtcgtgcccaggtacatcaggccgccgcactcggcgtagatcgccaccccgcgccggtgcgccgcgcgaagctgtgtcagcatctcgtggttagcggatagcccggccgcatgcagctccggatagccgccgccgagccagatcatctggcaggccggcagctggcgatcgcgcagcgggctaaagcgcaccatcttcacgccgcagcgcgccagcagcgccaggttatcgaggtaataaaaattgaaggcctcatcgtcggcgagggccagcgtcagtccttcgccggcatcggcggcaagctgttctccccactcgccgatcggcatggcggccagttcgctgagggccagcagccggtctatgtcgagggtgcgccccagcaggctggcaaaatcccgccatgcctgctgattgaccaccgactcgcgggcggtcaccaatcccagatgtcgttcgggcagcgccacgccttccacgcgcggcacatagccgagcactggcacccgacagtagcgctcaatggcgcttttcagcagctggaagtgcgcgtcgctgttgacccgattgacgataacgccagcgatgtcgagagccggatcaaaatgttgaaaacccatcaccgtggcggcgatggaggtcgacaccgctttgccatcgaccagcaaaatcaccgggcagccaagctgcttagccattgccgcgctgctgcagtagttagggtcggtgccgtagccgtcatacaggcccatcaccccttcgataaccgcgatatcggcctgctgtagctgttcggtaaacagcgcgttgagtatcggggcgggaagcataaagctgtcgagattgcgggaagcgatgccgctgatggcggtgtgccaggcggtatccaggtagtcaggcccgactttacagggttgcacccgcataccgcgctgttggagcaagctgagcaggccgagcgtaacggtggttttgccacaaccgctgccggtacccgcaagaatgaacgcacgcctggttgccataccctgtcctgttctggcggtcagggtatagctacgcgcatgcctggtcctgcgaccacgcaccgctaagccacccacttcccaccgaagttgttggtcagttaccggcaggcaggtcttctggcttagcctcgttctcgcccgcccttcccaatctttcgatcagtggtttttgcggggtcgtcagcatcacagcagcgggggctgcgggggatttacacccccttccctgacaccaaactggtgtcgaacctgtcggtttgtttcgccgatgcgccctgcatcgacgggcattactttatgttttcttttaccgtttcatcactcgtcacaatgacgtcagtgaaggaaagcggtgttgtgataatcagctgtctcgtattaacggacactctatctcatcacaaaaataaaaactggtgtagtttatccctcgaatatcactattttgttgcgctatgacaatttattgctctactgtcgtttttttcattttatattgatgaagatactcggggatatcaaaaatcggcaatagcaaaatattgtcatttaaaaagactcagtttgtgatccagcattaatttgctgacgaaatgcctgcggcgttacctgataggtctggcgaaacactttgcaaaaatagctggtttgcgaaaaacctaaattccgcgcgatgctggcgatgctccagtcgctgtggcatagcagctcttttgcgctcgccatccgctgctgattgacccaggcgttaaaaccgatcccctgatactttttaaacagtttgctgaagtagtacgggctgagatagacatgcgccgccacatcctccagacgcagctcatcggagagatgcgcgtcgatatagcgcagcgccttcttcattttgccatcgtgcggcgagggcgcccggctggcctgcgccggatcgttctgcgacgggttatctttgataaccacaaagttgagctgttttttcaggcaattctcgacgatcagcttcagcagatccgccgaagcgataacccgcgaatagtccatctccggcacatcgcgaaacgcctggaccagcgccggatcgtcctgccagcggtcatcgacgttcaagatatcaaccagttcaacatcattgctcagacgcacctgcccgcacagcacgaaaccgaccaggtggccggcgatcaccagcgggatggaaaaatcggttaaccccgcatgacagcggtagatacacagctggtctttttttgaggcttccagcccgccgcagcggtcgctcatgcgacagcgtccgctgtgctccgggtgctgacgcatcagctggcaaaacggcgtgaaattaaacaattcagaaatctcatcaccgtgaatattgacgaccacaaccgccagactggtggcttgcgcaaaatcctgtgcgattttattgatgagttctgagttcaaggtactcgcagaaatcatgataaaacccctcagttaattttttgttataaataaaacatatttttcatatttaccttttttagcatcagatcccatcgacgataaaaaagtgcattgacaataacaaaagtctcccaacccggggagactttttgagcggttcgtgatatcggttcatgaaattagcctggctatttcacagatacattccccttatgacgctaacgcgtattttcttcctccacgcaggtatgacagggcagattattggcgataagaaaacgataaattgcggcgccgaggcaggcccctaacaacggtgcgataatgggcacgataaaatagggaatatctcttcccccggtcatggcgatattgccccacccggcgaaccaggtgaacaatttcgggccaaaatcgcgtgccggattcatcgcgaagccggtaagcggcccggtcgaggcgccgatcaccgccaccagaatgccaatcaacagcggcgccagtgggcccttgggtacgccgttgccatcatcggtgagcgccatgatcatccccatcagcatcgaggtgatcaccacctccaccagcgccgcatgccagatgctgagctcaggcgccgggtaagtgctgaatatactggccagctgcaggctttccaggctgccgcgcaccatatgatgcaccgtttcaaattgcgtaaacagggtgctgtaaagtatccaggccagcacggcgccgccaaacgcgccggcgacctgagccacgatatagggcaccacttttctgcccgggaagcaggcaaacagccacagggcgacggtgaccgcagggttcagatgtccccccgaaatgccggccgtcaggtacaccgccagagaaatacccagtccccagataatacagatctcccacagccccaggctggcgccggtcagtttcagggcgctcaggcagcagataccaaaaaacagaaacagcccggtgcctaaaaactcggcgatacattgcgcgcgtaaagaaccattcattgtgacacctcgtgacgaagttcgtgtccaggccagccaaccatccgctggctcgttgggtacggcgaggcccactatagaaaccggcagcggcaaagtgttggcatcctgcggaaatcgggcggcgtaaagtcgccgaagaagaataatttattgctatttgttcgcgaatccatgcagcaatggcgggcgttcagggggtattttaatttccaactaaatgataaaaaattgcgaaagcgcagtgcttattttccaacaaatatcacatcacgcaaaatatcgcatagcaaaaacaatttaaaaaatcacctcttaaaatgtaaatacggagcgtgaattgcaatataatcacatttatataaacaataaaatcaaataaaaacaacgatataaaataaaataaatccattttatattatataaaaaccactatttttcgctctccaccatcaactcagccattctttttcgccgctccgccatatagttccctcactggcacatatcctgcgaggtctttatgcaacaagaagcattaggaatggtagaaaccaaaggcttaaccgcagccatagaggccgctgacgcaatggttaagtcggccaacgttttattagttggctatgaaaggatcggttcaggcctggtgaccgtcatcgtgcgtggcgacgtgggggcagttaaagccgccaccgacgccggtgccgccgcagcccgccacgtgggcgaagtgaaagccgtacacgtcattccccgcccccataccgatgttgaaaaaatcttaccgaaggggaatagccaatgagcagcaatgagctggttgaacagatcatggcgcaagtcatagcccgtgtagcgacgccagagcagcaggcgcttcccgataccccccatcccacaggagagacggctatggcagagaaaagctgcagcttaacggaatttgtcgggaccgccattggcgacaccctcgggctggtcatcgccaacgtggatgccgcgttgctggaggcgatgaagctcgaaaaacgctatcgctctatcggcatcctcggcgcccgcaccggcgccgggccgcacatcatggccgccgatgaagcggtcaaagccaccaacaccgaagtggtcagcattgagcttcctcgcgacaccaaaggcggcgccggccatggctcgctgattgtgctgggcgggaatgatgtttccgacgtcaaacgcgggattgaggtcgcgctgaaagagctggaccgtaccttcggcgatgtctacggcaacgaagcgggtcatattgagctgcagtataccgcgcgcgccagttatgccctggaaaaagcgttcggcgccccactgggccgcgcctgcggcattatcgtcggcgccccggcgtccgttggcgtgctgatggccgataccgcgctgaaatcagccaacgtcgaggtggtggcttacagctcaccggcccacggcaccagtttcagcaacgaagccattctggtgatttccggcgactctggcgcggtgcgccaggcggtgatctccgcccgggaaatcggcaaaaccgtactggcgacgctgggcgccgaaccgaaaaacgatcgcccctcctacatttaatacccgcgaggctgattcatgagatcgaaaagatttgaagcactggcgaaacgccctgtgaatcaggatggtttcgttaaggagtggattgaagagggctttatcgcgatggaaagccctaacgatcccaaaccttctatccgcatcgtcaacggcgcggtgaccgaactcgacggtaaaccggttgagcagttcgacctgattgaccactttatcgcgcgctacggcattaatctcgcccgggccgaagaagtgatggccatggattcggttaagctcgccaacatgctctgcgacccgaacgttaaacgcagcgacatcgtgccgctcactaccgcgatgaccccggcgaaaatcgtggaagtggtgtcgcatatgaacgtggtcgagatgatgatggcgatgcaaaaaatgcgcgcccgccgcacgccgtcccagcaggcgcatgtcactaatatcaaagataatccggtacagattgccgccgacgccgctgaaggcgcatggcgcggctttgacgaacaggagaccaccgtcgccgtggcgcgctacgcgccgttcaacgccatcgccctgctggtgggttcacaggttggccgccccggcgtcctcacccagtgttcgctggaagaagccaccgagctgaaactgggcatgctgggccacacctgctatgccgaaaccatttcggtatacggtacggaaccggtgtttaccgatggcgatgacactccatggtcgaaaggcttcctcgcctcctcctacgcctcgcgcggcctgaaaatgcgctttacctccggttccggttctgaagtacagatgggctatgccgaaggcaaatcgatgctttatctcgaagcgcgctgcatctacatcaccaaagccgccggggtgcaaggcctgcagaatggctccgtcagctgtatcggcgtaccgtccgccgtgccgtccgggatccgcgccgtactggcggaaaacctgatctgctcagcgctggatctggagtgcgcctccagcaacgatcaaacctttacccactcggatatgcggcgtaccgcgcgtctgctgatgcagttcctgccaggcaccgacttcatctcctccggttactcggcggtgccgaactacgacaacatgttcgccggttccaacgaagatgccgaagacttcgatgactacaacgtgatccagcgcgacctgaaggtcgatggcggcctgcggccggtgcgtgaagaggacgtgatcgccattcgcaacaaagccgcccgcgcgctgcaggcggtatttgccggcatgggtttgccgcctattacggatgaagaagtagaagccgccacctacgcccacggttcaaaagatatgcctgagcgcaatatcgtcgaggacatcaagtttgctcaggagatcatcaacaagaaccgcaacggcctggaggtggtgaaagccctggcgaaaggcggcttccccgatgtcgcccaggacatgctcaatattcagaaagccaagctcaccggcgactacctgcatacctccgccatcattgttggcgagggccaggtgctctcggccgtgaacgacgtgaacgattatgccggtccggcaacaggctaccgcctgcaaggcgagcgctgggaagagattaaaaatatcccgggcgcgctcgatcccaatgaacttggctaaggggtgaaaaatggaaattaacgaaacgctgctgcgccagattatcgaagaggtgctggtggagatgaaatcaggcgcagataagccggtctcctttagcgcgcctgcggcttctgtcgcctctgccgcgccggtcgccgttgcgcctgtgtccggcgacagcttcctgacggaaatcggcgaagccaaacccggcacgcagcaggatgaagtcattattgccgtcgggccagcgtttggtctggcgcaaaccgccaatatcgtcggcattccgcataaaaatattctgcgcgaagtgatcgccggcattgaggaagaaggcatcaaagcccgggtgatccgctgctttaagtcttctgacgtcgccttcgtggcagtggaaggcaaccgcctgagcggttccggcatctcgatcggtattcagtcgaaaggcaccaccgtcatccaccagcgcggcctgccgccgctttccaacctggaactcttcccgcaggcgccgctgctgacgctggaaacctaccgtcagattggcaaaaacgccgcgcgctacgccaaacgcgagtcgccgcagccggtgccgacgcttaacgatcagatggctcgtcccaaataccaggcgaagtcggccattttgcacattaaagagaccaaatacgtggtgacgggcaaaaacccgcaggaactgcgcgtggcgctttaacaaaggatatcccgatgaataccgacgcaattgaatccatggtacgcgacgtgctgagccggatgaacagcctacaggacgggataacgcccgcgccagccgcgccaacaaacgacaccgttcgccagccaaaagttagcgactacccgttagcgacccgccatccggagtgggtcaaaaccgctaccaataaaacgctcgatgacctgacgctggagaacgtattaagcgatcgcgttacggcgcaggacatgcgcatcactccggaaacgctgcgtatgcaggcggcgatcgcccaggatgccggacgcgatcggctggcgatgaactttgagcgggccgcagagctcaccgcggttcccgacgaccgaatccttgagatctacaacgccctgcgcccataccgttccacccaggcggagctactggcgatcgctgatgatctcgagcatcgctaccaggcacgactctgtgccgcctttgttcgggaagcggccgggctgtacatcgagcgtaagaaactcaaaggcgacgattaacagggggtaagcatgcgctatatcgctggcattgatattggcaactcctcgacagaagtcgccctggcgacggtcgatgacgcaggtgtgctgaacattcgccacagcgcgttggctgaaaccacgggtataaaaggcacattacgaaatgtgttcggtatccaggaggcgctaacgcaggcggcaaaagcggccggcattcagctcagcgatatttcgcttattcgcattaacgaagccacgccggtcattggcgatgtggcgatggaaaccatcacggaaaccatcatcaccgagtccaccatgatcggccataacccgaagacacccggcggcgtcggactgggggtcggcatcaccatcacaccagaggcgctgctgtcctgctccgcggacactccctatattctggtggtctcctcggcctttgactttgccgatgtcgccgcgatggtcaatgcggcaacggcagcgggctatcagataaccggcattattttgcagcaggatgacggcgtgctggtcaataaccggctacagcaaccgctaccggtgatcgacgaagttcagcatatcgaccggattccacttggcatgctggcggccgtcgaggtcgctttacccggtaagatcatcgaaacgctctccaacccctacggtattgcgaccgttttcgatctcaacgccgaggagacccaaaatatcgtgccaatggcgcgggcgctgattggcaaccgctcggccgtggtggtgaaaaccccctccggcgacgtcaaggcccgcgctattccggcaggtaatctgctgctcatcgctcaggggcgcagcgtacaggttgatgtggccgccggggcggaagccatcatgaaagcggttgacggctgcggcaaactggacaacgtcgcgggagaagcgggcaccaatatcggcggcatgcttgagcacgtgcgccagaccatggcggagcttaccaataagccagctcaggagatccgcattcaggatctgctggccgttgatacggcggtgccagtcagcgtgaccggcggtcttgcgggagagttctcgctggagcaggcggtgggtatcgcctcgatggtcaagtcggatcgcctgcagatggccctcatcgcccgtgaaattgagcacaaactgcagattgcggttcaggtgggcggcgccgaagcggaggcggccattcttggggcgctcaccactcccggcaccacgcgcccgctggcgatcctcgatctgggcgccgggtcgaccgacgcctccattatcaatgcgcagggagagatcagcgccactcacctggccggcgccggcgatatggtcacgatgatcatcgcccgcgagctggggcttgaggaccgctacctggcggaagagatcaaaaaatatccgctggctaaagtcgaaagcctgtttcatctgcgtcatgaagacggcagcgtccagttttttccgtcggccttaccaccgacggtatttgcccgcgtctgcgtggtgaaaccggatgaactggttcccctgcccggcgatctgccgctggagaaagtgcgcgccattcgccgtagcgccaaatcacgcgtctttatcaccaacgccctgcgagcgttacgccaggtgagccctaccggcaacattcgcgacatcccgttcgtggtgctggtgggcggctcgtccctcgatttcgagatcccccagctggtcaccgacgcgctggcgcactaccggctggttgccgggcgcggcaacatccgcggctgtgaaggcccacgcaatgcggtcgccagcggattactcctttcctggcaaaaaggaggcacacatggagagtagcgtagtcgcccccgccatcgtcattgccgtcactgacgaatgcagcgaacagtggcgcgatgtcctgctgggcattgaagaggaaggcattccttttgttctgcagccgcagaccggcggcgatcttatccatcacgcctggcaggcggcgcagcgttcgccgctgcaggtaggcatcgcctgcgaccgggaacggctcatcgtgcactacaaaaatttacccgcatcaactccgttgttttcgctgatgtatcaccagaacaggctggcccggcgaaacactggcaacaatgcggctcgtctcgtcaaagggatcccatttcgggatcgccatgcttaatccacaggagaacgcagtatgaataacgcactaggactggttgaaacgaaaggcctggttggcgccattgaagccgctgatgcaatggtgaaatccgccaacgtgcagttgattggttacgaaaaaattggctccgggctgattaccgtgatggtccgcggagacgtcggcgcggtcaaagccgccgttgacgccggcagcgcggcggccagcgtggtcggcgaggtcaagtccagccatgtgatcccgcgcccgcatagcgatgttgaggccattctgccgaaatccgtctgaccctcaaaaaaggagcaccgcgtgaagcaatcactgggattacttgaggtcagcggtctggccctggccatcacctgcgccgacgctatggcgaaagcggccgccatcacgctgctcgccctggaaaagaccaacggttccggctggatggtggtgaagatcgccggtgatgtggcctctgtccaggcggcggtgatgaccggggccgaactcgccgaacggcagcaggggctggtagcgcagaaggttatcgccaggcccggggaaggcctgctgccggcccgcgtccaggcgccttcaccagcgcctgacgtcgccgtgacggaggagaacacggccctcacagacgccccctcccactctacggagcgggtgacctgcaacctgtgcctggacccacactgcccacgacaaaaaggcgatccccgctcgcagtgcctgcacgccggtaaacgaggtgacgcgtaatggataaacaacagctggcttcgacagtcaacaaagtgctggatgagatgcgccagcgtcccattccaatcggtatctccagtcgccatatccatttagcggcggctgactatgccaggctttttcccgcgcagcccatccagccgaaaaaagcgctgctgcagccgggacaatatgctgcagagcagacggtgaccctggttggccccaaagggcgattaaacaacgtgcgcctgctcggccctttgcgccagaccagccaggtggaaatctcacgcaccgacgcccggatcctcggtatcgccgcgccgctgcgcatgtccggcaatctgcagggcacgccggggatccgcctgataagcccctttgccgaactggagttgagcggcgggacgattgttgcccagcgacatattcatatgtcgccacttgatgcgttgatcctgcgcgtctcccatggcgatagcgtcgcggtggcgatcgaaggcagcgacaggcggcttatcttcgacaacgtggcggtccgcgttgccccggatatgcgtcttgagatgcacatcgatactgacgaggccaatgcggcaggcgctgacgctgcgcaagcctgggcaacgctggtgacgaagccatgaaccacgcgatgctgcagcgtatcgtcgaagaggtcgccgcccgtctgcgccatcgcgccctcagcacggccacgctcagcgtggcccagctcggcgaagcggatatccgcagcctgctgtgccagcacgcttcgctgcgcatcgtgcaggtggatttaccgctgctggagcagcttgccggccagcgtgcgctggcggcagccggttgcgcactgcatgaggcgatggcctggggcgttcgggtacagctaacgctgcttcccgcccagctccccgcgctggcggtaaaaaaactcgcccgcttgccgctgacgttcagcgacccgcttggccagcccgtcaggcttcacgccgcgtcggtgctcacctatgccgacgtagcccgtttcagtggcggctatctggtgctgcgccgccgccccattatcaccgccctcgcccgcgaagcggccgtcgcgcggcatgttcaattgattaagcaggagtgaactatgcatctggcacgcgtgaccggcgccgtcgtctcgacgcaaaaatcgccctctctgaacggcaaaaaactgctgctggtgcgccgggtaagcgcggacgacgatcgtccgattctccccacgagcggcgatgaagtggcggtagattcggttggcgctggcgtcggcgagctggtgctgctctgcagcggctcgagcgcacgccacgttttcagcggcccgaatgaggccatcgatcttgccgtcgtgggcattgttgactcactttcacgctaagggggcgcctgtggctatctatacccgaaccggcgatgccggcagtacatcactctttaccggccagcgggtcagcaagacgcatccgcgcgtcgaagcctacggcaccctggatgaactgaacgccatgctgagcctgtgcgtctgcgccgtcgctgaagaggaacagcgcaccctgctcgaagccctgcagcagcacattttttggttcagcgcggagctcgccagcgacagcgaacagccatcaccgggtaagcgctatatcagcagcgaagagattgccctgctggagcagaccatcgatcgcgagatggcccgcgtgccggcgctgcaccagtttgtattgcccggacgctgtgaagccgccagccgtctgcacctggcccgcaccgttgccagacgggcggagcgccggctggtcgagctgggggcagaggttactatccgtcagatgctgctgcgttatctgaaccgcttatctgactgcctgtatgccctggcgcgcagcgaggatcatgccgctcaccagcgccgccttgtgacggagatcgcggcccgctatctggccgccagcgggtcgcctgcgcccgacgcgcccaaagcccaggccgggtcgctctcctttcacgagctgcatcagctcatccgtcaggccattgaacacgcccgccagctgcaggtgccggtggtggtcagcatcgttgacgcacacggcaccgaaaccgtgacctggcgaatgcccgatgcgctgctggtcagcagcgagctggcgccgaaaaaagcctggaccgccgtcgccatgaaaaccgccacccacgagctcgcgacgaccgtacagccaggcgctgcgctgtacggtctggagagccatctgcagggcaaagtcgtcacctttggcggcggatatccgctgtggcgcgatggccagctaatagccggcctcggcattagcggcggcagcgtcgagcaggatatggctattgcacaggctgccatggcggccattaacgtgagaactcatcaatgaatacagcagaactggaaacccttatccgcaccatcctcagtgaaaagctcgcgccgacgccccctgcccctcagcaagagcagggcattttctgcgatgtcggcagcgccatcgacgccgctcatcaggcttttctccgctatcagcagtgtccgctaaaaacccgcagcgccattatcagcgccctgcgggagacgctggcccccgagctggcgacgctggcggaagagagcgccacggaaaccggcatgggcaacaaagaagataaatatctgaaaaataaagccgctcttgaaaacacgccgggcatagaggatctcactaccagcgccctcaccggcgatggcgggatggtgctgtttgagtactcgccgttcggggttattggcgccgtggcgcccagcaccaacccaacggaaaccattatcaacaacagtatcagcatgctggcggcgggtaacagcgtctatttcagcccccatcccggcgcgaaaaaggtctcgttgaagcttatcgccaggatcgaagagatcgcctaccgctgcagcgggatccgtaacctggtggtgaccgttgccgagccgacctttgaagccacccagcaaatgatgtcccacccgctgattgccgttctggctatcaccggcggccctggcattgtggcgatgggcatgaaaagcggtaaaaaagtgatcggcgctggcgccggcaatccgccgtgcatcgttgatgaaaccgccgatctcgtcaaagccgccgaagatattatcagcggcgccgccttcgattacaacctgccctgtatcgccgaaaaaagcctgatcgtcgtcgcctccgtcgctgaccgcctgatccagcagatgcaggattttgacgcgctgctgttgagccgacaggaggccgataccctgcgtaccgtctgcctgcccgacggcgcggcgaataaaaaactggtcggtaaaagcccggctgcgctgctggcggcggcgggtctcgccgttccgcctcgcccccctcgcctgctgatagccgaggtggaggcgaacgacccctgggtgacctgcgagcagctgatgccggtgctgccgatcgtcagggtcgccgactttgacagcgccctggcgctggccctgcgcgtagaggagggtctgcaccacaccgccattatgcactcgcagaatgtctcgcggctcaatctggcggcacgcaccctgcagacctccatttttgtcaaaaatggcccgtcttacgcgggaatcggcgtcggcggcgaagggtttaccaccttcaccatcgccacgccaaccggagaaggcaccacctccgcgcggacgttcgcccgcctgcggcgctgcgtgttgaccaacggtttttccattcgctaaccgggggcgccatgcataccttttctctgcaaacgcgcctctacagcggcccgggcagcctggccgcgctgcagcgctttagccatcagcacatctggatcgtctgcgacggcttcctggcgcgctcgccgctgcttgaccgactgcgcgccgcgctgcccgccagcaaccgcgtcagcgtgttcagcgatattacaccggatccgaccattcacaccgtggcgaaagggatagcgcagatgcaggccctgcgtccgcaggtggtgatcggcttcggcggcggctcggcgatggatgccgccaaggctatcgtctggttcagccagcagggcggtctgcctgtcgacacctgcgtggcgatccccaccaccagcggtaccggttcggaagtgaccagcgcctgcgtcatcagcgacccggaaaaagggatcaagtacccgctgttccatgaggcgctctgtcccgacatggcgatcatcgacccgacgctggtggttagcgtaccgcccaccatcacagcccataccgggctggacgcgctgacccacgccctggaggcatgggtctcgccgcaggccaccgattttaccgatgcgctggcggaaaaggccgtaaggctggtgtttcgcgccctgcccgttgcgattcgtcagggcgactgcattgcgacccgcagcaaaatgcacaatgcatcaaccctcgccggtatggcctttagccaggctggccttgggctcaatcatgcgatcgcccatcagcttggcggccagtttcacctcccccatggcctggccaatgcgctgctgctgaccgcggtgatccgcttcaatgccggcgagccacgagcggctaagcgctatgcacgcctggccagggcctgccgcttctgcccgcccgaagctggcgaacaggaggctttccaggcgctgcttaccgcggtggaaacgctgaaacagcagtgcgccattcccaccctcaagggcgcgctgcaggaaaagtatccccttttcttatcgcgaattcccgccatggtgccggccgcgctggccgacgccaccctgcgcaccaacccgcgtccggtcgatggcgcggccatcgcgcaactgctggagagcctgcaatgagtgaagcgatagtgccactatcaagcattgatgcagcggagatccgcgaacgcgttcgggccgctggcgtcgtaggagccggtggcgcaggctttccgacccacatcaaactgcaggcccgggtggacaccgtgctggtgaacgccgccgaatgcgaaccgatgctgaaggttgaccaacagctgatggctcagcaggctgaccgactgattcgcggcctgggttacgcgatgaccgccactggcgcccgggaagggatcattgccctgaaggcgaaatatgctccggcgattgcggcattaaccccacgactcccggaatgggcccggctgcatattctgcctgacgtctatccggccggggatgaggtgctcactatctggctggcgacgggacgccgcgtaccacctgccgcgctgccggtcagcgtcggcgtggtggtcaataacgtgcagacggtgctcaatatcgccagagccgtggaacagggctatccggtaactcgccggacgttgaccgtcaatggcgccgtcgcccgtccactgacgctggccgtaccactgggtatatcgctgcgcgaggtgctggatctggccggcggcgcgacggttgacgatccggggtttatcaacggcggtccgatgatgggctcgcttattacctccctcgagacaccggtcaccaaaaccaccggcggcctgctggtgctcccgggcaaccatcctttgatccagcgacggcggcaggatgaacgaacgctgctcgccatcgcccgcaccgtctgtgaacagtgccgtttatgcacagatttatgcccccggcacctgatcggccatgagctttcccctcatctgctggtgcgggcggtgaactatcgccaggcggccaccccgtcgctgctgctcagcgccctgacctgttcggagtgcaacgtttgcgagagcgtcgcctgcccggtgggtatttcccccatgcgcatcaaccgtctgctgaaacgtgagctgagggcgaaaaacctgcgctacgacggaccgctgcgtccggcggacgagatggcgaagcaccgcctggtgccggtcaagcggctcatcagcaaactgggacttgatccctggtatcaggaagcgccgctgacggcggtggaaccggaggtggcctgcgtcaccctgcccctgcgccagcatatcggcatcagcgccgtgccctgcgtcgcgccgggagagcgggtaacgcgcggccaggtgctggcggatatccccgccgacgccctcggcgcgccggtgcacgccagtattgacggcctggtctccaccatcacggagcaggccattacgcttgtaagaggttaatcatgacccaggctatcggaattttagaactgaccagcatcgccagggggatggagctgggcgacgtcatgctgaaaagcgcgaacgtacagctcctgctctgcagaaccctttgccccgggaaattcctgctgatgctcggcggcgacgtcggcgccgtgcagcaggcaatcgccgccggcaccgcgcgcgccggggagatgctggtggacagcctggtgctggccaacattcaccccagcgtactaccggcgatcagcggtctcaacgtggtcgggcagcggcaggcggcggggatcgtcgaaacctggagcgtggcggcgtgcatcagcgccgccgaccgcgcggtgaaagcggccaacgtcaccctggtgcgggtccatatggcgtttggtatcggcggcaaatgctacatggtggtggcgggtgatatcgccgatgtcgacaacgccgtcacggtggccagcgacagcgcaggcgagaaaggattactggttcaccgggcagtgatcccgcgaccgcacgatgcgctgtggcaacagctgatggagggataatggaaccgcaaacccctaccgaacgcatgatccaggagtatgtcccgggcaaacaggttactctggcgcatctcattgccaatcctggcaaagatctgttcaaaaagctgggtctgccggacgcggtctccgccatcggcattcttaccattacccccagtgaagcatcgattatcgcctgcgacatcgctaccaagtccggcgcggtggagatcggttttctcgatcgcttcaccggcgcggtggtgttgaccggcgatgtctccgccgtggagtacgcgctcaggcaggtcacccgcaccctcggtgagctgatgcgcttcaccgcttgcccaattacccggacctgagcccatgaaacgcctgatgctaatcggacccagccagtgcggcaaaacctcgctgacccaggtattgcgtggcgaaaccctgcgctatcagaaaacccaggccatcgtctggacgccggccgccatcgatacccccggggaatatctggaaaaccgctgcctgtacagtgcactgctcaccagcgcctgcgaggccgatgtcatcgcgctggtactaaatgccgatgcgccctggtcacctttttctccggggtttaccgccccgatgaaccgcccggtcatcggggtgatcactaaagccgatttggccgccccgccccgtctgcaacaggtccggacatggctcgagacggcgggcgccggacatatctttatcaccagcgcgttaaccggcgacgggcttgatgacctgttcgcctgcctgaatgcagaggaatatcaatgacctataaaatcatggcgattaacgccggcagctcctccctgaagtttcagctgcttaacatgccgcagggggcgttgctctgtcaggggttgatcgaacgtatcggcctgcccgaggcccgcttcacgctgaaaacgtcggcacagaaatggcaggagacgctgcccatcgccgatcaccatgaggcagtgaccctgctgctggaggcgctgaccggccgcgggatcctgagcagcctgcaggagatcgacggcgttggccaccgcgtcgcccacggcggcgaacgcttcaaagacgccgcgctggtctgcgacgataccctgcgggagatcgagcgcctggcggagctggcgccgttgcataacccggtcaatgcgctgggcatacgtctctttcgccagctgttacccgcggtaccggcggtggcggtttttgataccgcctttcaccagaccctggcgccggaggcctggctctatcccctcccctggcgctattacgccgagctgggcattcgccgctacggttttcacggtaccagccatcactatgtcagcagcgcgctggcggaaaagctgggcgtaccgctgagcgccctgcgggtagtaagctgccatctgggcaatggctgtagcgtctgcgccatcaaaggcgggcaatcggtgaatacctcaatgggctttactccccagtccggggtgatgatgggcacccgcagcggcgatatcgacccgtcgattcttccctggctggtggagaaagaagggaaatccgcccagcagctcagccagctgctgaataatgaatccgggctgctgggcgtctccggcgtgtcctctgattaccgcgacgtcgaacaggcagccgacgccggcaacgaacgggcggctctggcgctgtcgctgtttgccgaacgcattcgcgcgactatcggcagctatatcatgcagatgggaggtctggacgcgctgatctttaccggcggcataggcgagaattccgcccgggcgcgggcggcgatctgccgcaatttgcattttctcggcctcgcgctggacgacgagaaaaaccagcggagcgcgacctttattcaggcggataatgcgctggtcaaagtggcggtgatcaacaccaatgaagagcttatgattgcccgcgacgtcatgcgtcttgcattgccgcaggcgcgcgagctggcggtgtcggcataaacgacgcgcctcctcttgcggagaatcatggtaaccggcgggtcgccatgccactatgcgccctggcgaaggtaagcggaaaggtgaaaacgtggctgttgcacaatgtcccgcctcgtgcggagaacttatccagggctggatcctcggcagcgaaaagctggtctcctgtccggtggactggtacagcaccgtcgaggtcgagaccggagtaccgcgaaaagacgagcggccgctgtcgcgggcgatggtcgaccagctgctggcccactggggctaccccccagcgctgagccagcagatccgcatcaccctgcactcaacgatcccagtggccaaagggatggccagcagcaccgccgatatcgctgccaccgccgtcgccaccgcccatcatctgggccatctactggatgagccgacgctggcgcgcctgtgcgtcgcgctggagcctaccgacagcaccctgtttcgccagctgacgctgttcgaccataataccgccgccacgcaaatcgcctgtccccctccgccggcgctcgacctgttagtgctggagagcccgctgacactgcgcaccaccgactatcaccagctgccgcgcgagccgggcctgttggcaaacgcctcccggctgcagctggcgtgggagaaagttcaacaggcctgccactgcggcagcccgcagctgctgggcgaagcagcaaccatcagcgccattgccagccagcagctgttgcctaagccggggtttgacgcgctgctggacctggtggaaagcgcagggctctatggtctcaacgtggcgcacagcggcagcgtcgtcggcctgctgctggaccgccgtcggcatgacgtcgaatttctgcaatggcggctggcagacagcgacatcgccgcccactggccgcagcagcatctgttggcgatggtgcccgggggcgtcatcctgcagtaggcctcaggccagcacccggcgcaacgccaccagcagctggtcgttttcctcggcgctgcggatcgccacgcggaaatagcggctatccagccccgggtagttggcgcagctgcggatcagcacatgctggcgcagcagggcatattgcaggtcaaaatcgggtctgtcgcagcgcaagaacaggtagttagcacgcccgggccatacggtcagcccggccatctcctgcagctgcgcatagaaacgcgctccctcctcctgcagccactgccaggtggcccgctgatacgcccgatcctggagaataatttccccggccagggcggcataggcgttgatggaccacggcatttgtcgcgcgcgcagtcgggccaccgcctgggcatcagcgttcagcaggtagccgagacgcagccccggaatggcataaaatttggtcagcgatcgcaaaacccagacgtgcggatgctgcgccagcagaggaataaaccccggctggtcggggataaagtcgaggaaggcctcatcgaggatcaggctgatgttcagcgctcggcagcgctgcgcaatggcttccagcaggccccgctccggcagcaggccggtggggttgttcggggtgcagagaaacaggcagtccagcgccggagtcagggcatcgaggatcgcgtcggtcagctgccagccatcgcgctcccgcagggcatactccaccacctcgcagtccaccgtctgcagcgcccgccggtactccgcgaaaccgggaatgacgatcatcgcccgccgcggcttaaggccgtggacgagggtgaagatcgattcagtttcgccgttgccggcgaggatatgcgccgtcggcaactgatggtgggcagccagcgcctgatgcagctgttgatactcgacgtcagggtagcgttcggcgcagcccgggttgtcaacgatcgcctgcctgagcgaggcaggcatccccagcggattgatgttggcgctaaaatccagcagctcgccgggggctatgcccagcagggcggcggcctcgcggatattgccgccatgggcgcttttcagtaaggccatgtccctttcctgtgtggttatccgcggcgggccagcgtcgcgccgtcggcgaagtaggctttaatcccggcgaggatcgactcggccacctcctgctggaatttggccgttttcagtttccgctcttcttccacgttactgataaacgccgtctccaccagaatggaggggatatcaggcgccttcagtaccgcaaagcccgcctgctctacccgattcttgtgcaaattattgatattgcccattttctccagcaccgcctttccgaatttgaggctgtcggcgatggtgagagactgcaccatatcgaacatggtgtggtcgacatagcggtcgccgctcttgctgaccccaccgatcagatccgaggcgttctgcgtctgggcgagatattttgccgcggtactggtggcccccttggtggagagggcaaacaccgaagagccgctgggctggcggctggtaaaggcgtcggcgtgaatcgacacgaacaggtcggcgcgctgcttctgcgccttggcgacacgcactttcaacgggataaacacgtcttcgttgcgggtcatataggccttcatattgccttctttgtcgatcagcgcccgcaggcgacgggcgatctgtagcaccacgtctttttcgcgggtgcgatacttccccacggcgccggagtcttcgccgccgtgcccgggatcgagcatgatgacaatcggccggtcgcgcccggctttgcccggctgcggcccgctttgcgccggcggcacctgccgctccagattgcctttgttgtaatcctcgagcagcgccagcagcggatcctgaacatcggtagcgttggcggggtagagatccatcaccagacgctctttaaatccggccaccggcgcgagggcaaacagctgcggcttaacgttctgcttgagttcgaagaccatgcgcacggtttgcggatcaaactggcccacccgggcggacttaataaagggatcgtcagcgcggatctggccccccatgcctttcagcacagagttcaggttaaccccttccagatccactaccactcgttccggattactgagggcaaactgccggtatttcagcacatgattcgattctaccgtgacacgcgtgtaggtcgatgctggccagacgcgaacggcgaccacccgcgcggcggcggccaacccgacagggctcacgctcattaaccacatggcgcccgcgccctgcaacagacggcgacggcttaatcctgagttgtttcccgacatgccactcccaagcaataaaaacgcatttatacccaaaacaaacagattgaccagaaactttaacgaaaggcatataacctgtcatctataaaagggtaaacattcattgacaccctgcgccgggtcacatgtttttcgcggcttagcctcaaattggggcttgcgtttaacggcaaaacagaataaaaatacaataattacgaataatcatgcattgagggtttgtcatggtgaaggaacgtcgcactgaactggtagaaggattccgccattctgttccctatattaatgcccatcggggaaaaacgtttgtcatcatgctgggcggcgaagccattgagcatgaaaatttctcaaatattgtcaatgacataggattattgcatagcctgggcattcgcctggtggtggtctatggcgcccgcccgcagattgacgctaacctcgccgagcaccatcacgagccggtctatcacaagcagacgcgagtgactgacgccaaaacgctggagctggttaagcaggcggcggggatgctgcagctggagatcaccgcccgtctgtcgatgagcctcaacaacaccccgctgcagggggcccatatcaacgttgtcagcggcaactttatcattgcccagccgctgggcgtcgatgacggcgtcgattattgccacagcggacgcattcgccgcattgacgaagaggcgattcatcgtcagctcgacagcggcgccattgtgctgatggggccggtcgcggtgtcggtcaccggcgagagctttaacctgacttcggaagagatagctacccagctggccatcaagctgaaggcggagaaaatgatcggcttctgttcgtcgcaaggggtttacaaccaggccggggaaattgtctccgaactgttccctaatgaggcgcaagcccgcgtcgaagagctggaagcagacgaagactataactccggcaccgtgcgcttcctgcgcggggcggtgaaggcctgccgcagcggcgtacggcgctgccacctgatcagctatcaggaaaatggcgcgctgctgcaggagctgttttcacgcgacggcatcggcacccagatcgtcatggagagcgcggagcagatccgtcgggcgaccatcaatgatatcggcggtattcttgagctgataagcccgctcgagcagcagggcattctggtacgccgttcccgcgaacagctggagatggagatcgacaaattcaccattattcagcgcgataacaccaccatcgcctgcgccgccctctatcctttcccggaagagaagatcggcgaaatggcctgcgtggcggtgcatccggattaccggagctcgtcgcggggagaggtgctgctggagcgtattgccgctcaggccaggcagatgggactgagcaaactgttcgtgttaaccacccgcagcatccactggttccaggagcgcggcttcacgccggtggatatcgacctgctgccggagagtaaaaagcagatgtataactatcagcgccggtcgaaggtgctgatggccgacctcgcttaagcccttctcctctctatctaacggcccgggatagcgcgacgcttatcgctttatccccgaccggtctcccgcccctcttcccgccagcctggcgtacgcacgcgggcgaaattcctggtttccgcgcaggccatttctttctcgctggctcaccgatatgctattggctgtcgacaggacgtcgactggcgccgcggccgccacccgcccagcaaggatcgcttaaagaatggaaaccaaaccgaactggctggtcagacatattaatctcattaccaccgcggtcgccctctatccgtggttgctgatgatactgctcctctgggataaccagcgccatcatcagcatggctatgccgcgctcggcgccgccatcgcgatattatttctgctggccctgacgtccggcatgaatcttctcatctcctcgctggtgattttttgtgcccgctgttccaccccaccgctggccggcggcgcagcagtccgctttttcgccatgaactcgatctcggcgctctggcttatccctctgttcttcagttactgatttttccgccagcccgggcaacggctgcagcattttccatcgcccggacccggcgtctcagggggcttcgcgcccggcgaaaatctccgccaggccgctgcgccgttcggtgcgcgtcacaatggcctgggagagcacctgctcgtcggcatagagcgacaaccgccgtttcgcgcgggtgatcgccgtgtagaccagttcgcgggtcaccagcgggacgctgcgcgccggcaggatcagcgccgcgtgttcgaactccgagccctgcgatttatgcacggtcatcgcccaggcggtatcatgctccggcagacggctcggctgcaccgacttgatggcgccgtcgggcatcaggaaccacacccgcagctcgccgttgcgctccagggcgatgccgatatcgccgttaaacagccccagcgcgctgtcgttgcgcgatatcatgatcggtcggccatcataccagcgagagtggcgcggcagggcgatcgcccgctggcggttgagccgctgctccagccgctcattgacgccgctcacgccgtacggcccctcgcgcagcgcgcacagcagctggaattcgctgaaagcggccagcatggcctgcggttcggcccgctcgcggcgcagctgcaggtagcgctcatagccctgctgagccgcgccgagcatggcttcgtactcttcggtcgtgctgaggggatgaagcgcgatatcgtcaaacggctggcgcagcgtggccttcacctccgcgcgcgcgccagcgttcaccgcccgcgccaggctcccgatgccggagtgactgccgaagcgatagctcttttgcagcaggcacaaactgtctctcagcgcgcccgcgatagccccctcgcccgccggcaccggcgaaccggtcagccgggtcagctcctgcgcccgcgcggcggtatagcccgaactcgcccaggcgcagatatcccccagcaccgcccccgcttctacggaggccagctggtcgcgatcgccgaggaaaatcacccgcccgtgggccggcagcgcgtcgataagccgcgacatcatcggcaggtcgatcatcgaggcttcatccaccaccagcacgtccagatgcagcgggttgccggcgtgatagcgcatccgctggctgcctggctgggcgcccagcagacgatgcagcgtgctggcctcggtgggaatcaacgctttctgcgcgtcggtcagcggcaattttctcagcgccgcgcccagcgattcggtcagacgcgccgccgctttcccggttggcgccgccaggcgaatacgacagcgcgggctgtcttcgatctggatcagcgccgccagaagcttcgccacggtggtggtcttcccggtcccgggaccgccggagatcactgagatgcggcgggtcagcgccaccgccgcggccactttttgccagtcggtttcgccggtggcagggaacagggcattcagggttgacgccagccgggcctcatccatctccagcacccggttggcttcattgaagaagcgggcgacggtcagctcgttgcgccacatccgattcagatagagccggtcgccgcacaaaatcatcggcgccggagcatcgccgcagctcaccgccgacgaagcgagcagtagcccgggccagtcctccggcgcgccggcttcggccagcagccgatcgcggatctcccccgctttaccgctcagcgcctcgtcgccgctcaaccgcgagagcggcagacagacgtgcccctcgccggcatcccggctcagcaaggccgccgccagcttgaccgccggcgggtcgttttgcgccaccatcagggcaaactggacgtccagcggccgcagcagacgctgctccaccgccgccagcagtagttgttcgaaagtcatgaggcctcctcctgagtttctccggcaaaaagctgatccagaccgtcaatcagcggtcgcaccggccgggtggtgaagatcccctgccccccctcctgcccgtccatgccgcgcaggaaaagataaatcacgccgccgaagtggcggtcatagtcataatcggccagccggtggcgcagatagcggtgcagcgccaggctatacagctgatactgtagatcgtagcggtgggcacgcatcgcctgctccatcgccggccgggtgtaggcctcgcgatcttcccccagccagttggatttgtaatccagcaggtaataacggccttcgtgacggaagaccagatcgataaagcccttcagcatgccgcgcacctggcggaaatccagcggcggcgtgtcggcagagaggggatcgtactggcggataagcgcgtcaaggcgctccgccgtcagcagctgggcgatgggcaggtaaaatgccatctccacctgtttatcccgcgccgcaagctgattgagcgcgatatccggccccggcaggcgggtcttcagcacgccccccagccagtcggtcagcaccggcgcccactgcgcgtcaaacccgctcagctgcagcttctccgccatccacccttccggcaccggctgggtgaagtccagctcctcaaacaggctgtgcaggaaggtccccggcgcggcgccgcgcgggaactggtgcggagtcagctgcggctcttccacgacttcgccgacgccggcggcatcaacatccagacgcggcagcaaatcctgcccgccgctgaaaccatgctgctgcagtccggagtaactggtcacccgccagtcgtcggcgatgcggcgctgcagctcgcgcgccgacaatcgcgggatggtcgccgcgggcgcctgccacggggtgagatccagttcgcccggaatctgtaatgcaatatcgccatgacagaagtccgccagccgcgcagccagcccggcggcgtccatggcttcgcccgcctgcagcagccgtcccagcgcgctgaggtggaaatcgctgttgccggatttccggctgctgagcggcgccacgccgaggctgcagtgccagaccgcgcgggtcagggccacgtacagcaggcgcagatcttccgccagtcgttccgcctccgccagctcgaggctggcctcatcctggcccagatccagcaccgccgcgaacgtctcgcgatcgtggtaaaacgcctggtcctgtttacgaaaccgggcgataaacggcagccagaccagggggtattccagcccttttgacttgtgaatggtgacaatttgcaccaggtgcttatcgctttcgagacgcatctgctggctggcggcgttgctgtccggctcggcgatatgctgcgccagccagcgcaccagggcatgctcgctttccagctggctggccgcctcctgcagcagttcgctgatgtgcagaatgtcggttaagcgccgctcgccgccgcgtgtcgccagtagattctcggctatatgtcgggctgtcatcaacgcccgcagcatcggcatcactccgcgctgccgccaaatctggcggtattcgctaaactcttccaccagcgcgtcccacgcctgctcatcctggttcaggttttcaatatccagcgcggtcaggccaaacatcgacgtcgccagcgcgctgcgcagggtattttcccgctccggggccagcaccgcctgcaatagccagagcagctcctgggcctcaagcgtctcaaaaacgctgtcgcggttggagaggtagactgagggaatgcccagcgtctgcagcgcttcacgcacctgcgccgcctccagccggttgcgcaccagcacggtaatatccgaagcctgtaccgggcgcgaggtttccccgcgccacagcagcgcgcgcccccgctgaccggcgctcagccagtcgcggatctgcgtggcgcagagctgcgccataaaggtctgataatcgccagacccgacagtgtcgccgggcatcagccagacgttcatcgccggtacgtccgccgcgtcaacggtaaagcgcagccccttgttcttcgccgccgccttcaccggcaggaacgggatctcgtggaacatgaaggggttatcgctgaggctgaacagccgattgacgctgcccaccatgcccggcgaggagcgccagttggtatcgagggtgtagtgcgcggcaacgtcgccgcgcgctttcatataggtaaagatatcggcgccgcgaaaggcgtagatggcctgcttgggatcgccgatcagcagcagagccgtctccggctgccggcgccagatgcggcgaaaaatccggtactgctgagggtcggtgtcctgaaattcatcgatcatcgccaccggaaaacgctggcgaatggcgctggccagcgtctcgccgctgtcgccgcgcagcgcctcgtcaagccggctgagcatatcgtcaaaccccagctcgccgcggcggcgcttttcgcgggcgaccgcatcgcggatctcgaccatcgctctcgccagcaccagatcggtgagcgtcagcgaggaggccagcaacgactctacggcgctaaacaggggatgcaccggcggttcgccaccggctttggtgcgctcgagcagaaacgactgggcaaatttctccagcgcgtcgggcagttggtagcttaacgtctcttcctgcgcccaggcgttcactttctccatccacttgccctggttgccgcgattaaacttccgccggtcaaggccggaattttccagcacgccttcgatctcgcccacctgctcgcgccactgctgcttgagcgagtcaatgcgggcgatgatctgctgatggcgttcggccagcgtctcgttaggggctggcggcgacttaagctgcggcgcttcgccctgcagccagcggtcaagggacttcagcagatcgcgcggccctttccagacgtcgtggatcaccgccgcgatatcgcgggtcaggggatagcagtggcggcgccagaaatcggcgcaggcctgatagcgcaggcgggattcatcctcgatcagctgttgctcgaacagcatgcccgactcgaaggcgttaaggctcagcatccgttggcaaaagccgtggatggtgaataccgccgcctcgtccatctgccgttcagccagcagcagcgtcttcgcggcgtcgtctttatcggcgatctccgccaacaacgcgctgtagagcggattgtcggattcgccgcgcaggcaggcgatgcgcagttcgtggatgttgctgcggatacggccgcgcagctcttcggtcgccgcctcggtaaaggtcaccaccagcagttcttcaacgctgatggcgcggggataggcggcctcaccgcccagccccaacagcagccgcagatacagcgcggcgatggtaaaggtttttccggtgcccgcagaggcttctatcaggcgctcgccgatcaggggcaagcgcaggggatccaaagactcagcggtgtcggtcattcattctctcgcatcaggggtaaggattgctgcaatgcgctgacgttttcccacactttgccgcctttcggctgggcatagtccgctttgccattctggctaccggaaatctgggacaagatcgtcatgccctgcggatccaccaccgtctgatggaagaagtcggcaagtttttgcggcgtcagcagtttaatctgagccactactttatcacgtgaatcaaaacgcatattaccgcgatcgaaatctttgctcagtttcgaggcttcatcgcccagcgtctgcggcgcctgcagaatctggcttatcaccgcctgctggagctgagcaaactcttccggcttcatcgcccgcagcttcgcctccgcggtggggaagaaggcctggaaccgctgccagaggaaggccggctgcttatcgctactctgcagcaggaagcccatgccccactggcgccccacgttcatcgggaaggcaaagaccgcgtagccgagctgctcttcagtacgcagctggttgtagaaccacggctgaatgatctgccccagcagggtgctggcggcggtgctactgaactcatccacgttgggcggcgcaaacaccgcggccagcgcggagtcggtgctgttgcccgctttattgaagatcgccagctgctgccgattcaccaccacgtctttattgcggcaccattcgttgccgtcagcgcccagctgctgctggatctggcgggccagcgtcgtggcggcatcggcggtcatattgcctatcaccatcagttcaggacgccccctggttttcaggttggcgcggtagttgagcacctctttaagggtaatggagggcagcagcgcccggcgcacttcgcgctggaagtacggcacctgcgagaccatctggatcggcataatcgcctgatcgtaggctttgcctttctcggcggaatccatcatctgcgcataccaggatttggcctgctccagctgctcctcggtcggcgtatagctgaagtatccctgcaacagatcgctgaacagcgccggaagatgctgggtatagccgttggcattgaccattaatccgttattagcgccggtagagaacgaaatgccgccgaccgccgcctggttactgagctggtcgagggcgatgccggcgagataatcgttgagggcaaacatcacctgccggcgagcgctgtccatcgcctgagggttacgcagcaccagggagatgtccgccttcggctcgctggcaaaatactggctcggggcatacaccacccgcagcgtcggttcatccaggatcagctgcggatgcggccaggctttatcgcttttgataagggtgaagtcatccggaatataggggttgagcgccggcagccgcagctggatggcctgcgatttgtgctgccagtcagcgaacgtctgctcgctaatcttatccacctgatacggcgcatcgacaaagtaggccgtcttgttatgcggctcctgggggctgatataccagatacgggcgttctgcggggtcatcatcgccagccggtctttgatcgcctgcgggtcgtactggtcggcaatattcaccacgtccagcgcatgctcgaccggcacccggatcatggtgtccgccagccattccacgtagtccatgtcgcggttgatcgacggatagcggaaatccagcgccagcacatgcgccagttcgtcgaaatagcgtttgtcgatgccctgagtacgcaggaggtcgaggtagctgaaaatggccgccgtcacttcatcgcggtgcgccaggcctttgtcggtgagggtggctgagatcgccagtacgccgctgttgccgtttaccaccggatcggaatcggcgcggataccttccgccagaccctgtttttgcaaccagtcagagagcgtgcccgggctgcggttgccgataagataggtgatcagctcatcggttttgctgcggaagcgatcgctgttgttgtcgatgcgaaactcgacgcgcagcactttacgcggcatcgccggcacatagtgaataatgatgcctttttgcgcatccgtgaccaccgggacggtaatttccggcctgctgatctgacgattcggcacgcggccaaaggtgtccgcagccatgcgcgccagcgccggcaacggcttgttgctgtagatcaccgctttcatcagattggcggagtaccagctatcgcggaaggtgtgcagcgcatcaagcaccgggctgccgggcttatcgctgagcgtctcgaggttgccacccgagaagtgggccgccgggtgagccgggttgatggtctccgcgctgacctgggccatgcgcatcccgtctcgcgtccgggccatcgtcagctcggcgttgaccgcgttacgttcgcggtcggcatattttttatccagcagcggcgcggcgatggcgtcggccaggcgatctacggccccgtccagcgcatcattttccacttcaagataaaacgcggtgcggtagggcgcggtactggcgttatggctgccgccgtgcagcttaagaaactctgcaaggctgtcaggctggggatatttttgcgaccccatcagcgtcatatgttccagaaaatgcgccagcccctgatgatctgccggatcctgcagggatcccaccggcaccaccagcgccgacagcgatttcaccgcctgcggatcggaaaccagcagcacgaccatgtcgttatcaaggcggatcgcctgatactgacgcgtatctttttcgcttttgcggatcgtctcctgaatcggctgccatccggtgtcggcctgactaaacggcgcccagagggcggccagcacaacaaaaaccttgaaccataaactgcggggcattcacgaacctcatcattaacaaacttgcgctgcacagcgtgcagccttttatgtccatcagtccgtgatacgttgcgcatattaaatgaaccgtcattcactgcgcaatttttatactatttaaatttgtgtggaccgatggtaacgatatagcggtaacagataacgctgcgtctgggcaatgatttcttcgtaatgcgccggctccagcgaacgccacaggcgttgataccagatatcggcgccctccccgctgaccaccatgttcccttcgtaggtctgcaggaatttgctccgcgctttctgctgcgtctcttcgtccattaagatgacatccttttcggcgtcgtaacaggctttcagccaggcgccaccgctttccggcagcagcagcagcggctgcgacatccccagcaaatagccatccaccagctcgttaaggtacgcctgcgcctcggcgggcgccagcgccggaaagcgccactctccctctttccgcacaaacagccggctctcgccggtgccgccgctggagcagtagacaaggtgttccagccaaagttgcatcccctgggagacgctcagcagcgaaggccgccagcgcagcagaccgtccggctgcacctgctgcagccagccggtcaggttcacgccgccgcactgcagatcgatctccatgctctgcgcctgctggcgctcggccatcacccgctcggccagcgcctgcatctccaggcgctgcgtctcccagaccagctcgccaaaggcgccatacggcagctcgccggcggcgcgaaagcggcggaacatagccgagacgtcctgctcctcaataagcgtattgagcagttgctgattcagttgataacggctcagcccttcaagagtgaacggctcgtcgtctggaatatcgtcctcttcggcgcggaaattgacccgcaaacgctgctgaaagaacgcgcgtaccgggtgctgccagaagcgcagaagctgatcgaacggcaggctgtcaatcggcggcgcggtgagcggctgtataaaatcgctatgcgcctctccctgctggccggcggccgccagccattcacgagcgtagctcttgttctcgtcttcctggaaattggcaacgtcgaacggcatgcgcgtatgcagatgggtgatatgggctttaacccgcgcttcgctggcgtcgcagtcaagctcttcgtcaccggcgagacagtggctctggccgatataatccaccagctcctgcaccagcaccgaaggaaaacgctcgctgttgtcctggatcgaacggccgatatagctgatatacagcgtctgctcggcggacatcagcgcttcgaggaacagatagcggtcatcatcgcgccggctgcggtcgccgcgctgcggcttctggctcattaaatcaaagcccagcggcggtagcgtgcgcggataaaccccgtcattcatccccagcaggcacaccaccttaaaggggatcgaacgcatcggcatcagggtacagatattgaccgggccggcaagaaagcgctggctgatccgctgctgatcgaggcgctgggccagctcatcgcgcagcagcgtcagcggcacctgctcgccatactgcgcctccagaccgctatcaataaccgccagccactgctgctcaatcagcgccagcgccgcttcggtctcactgtccggcaggaaaaagtcattcagcagatcgcgacagaccggcagccactccgccagcggccgctgctgggccaggccgcgtcgccacagattaagctgcatcagcagcgacgcgaggttgcccaccagctcggcgatcaaaccgctggattcgtcatacggcagcaccgactgccattctccctcgcggctgtccatcgcgtagcccaacagcatgcgggtgaggccgaaccgccaggtatgctgcccggtcgccggcaggtccagctcacggacgttgtcgtcatccattccccagcggacgccggactcgttcacccactggcgcaggtagcgcagcccttcttccgtgatattaaagcgcgccgccagcaccgggacgtccagcagcgccagcacatcttcactggcgaagcggctgtccggcagtgagagcagcgtaataaacgcctgcagcaccgggtgcgactctcgggcgcgacggtcggagatcgcccacggcagccagcgatcgccgctggcggcgccaaacaccgcctgtatataggggctgtagctgtcgatatccgccaccatgacgatgatatcccgcggcgtgagcgtcggatccgcctccagcatcgccagtagcctatcgtgcagaacctccacttcgcgctgcggactgtggcagacgtgaatgctcagactgcggtcatccagcgtcagcggacgtttgtcgcgactgtgggcgaatgcctctgcgctctgcccggccaccgccgcgttgcgtagttcaaggatatccgactgcaggttatgcaacaggttatcgggggcgatgtcgacaaaagcgtccagctcctcatagcgctccagccccgccagcaggtagatatagtcgcgccccagtttcccccaggaggcgagcaacgggttgccgacatcctgttccccggcgtcattaaacaaccccggcgcctgctcggtgtcgcgaaacaggggtagcgcgcgcgcctcgcggtgatggcgccgctggcgcgacagcagcttcgccaggaacgccggatccttaatgtctccccagtagtagcggcaggggttggtaaacaatacgtagacatcgacatgcttacccagcgcctgcagcgcctgaagatagaccggcggcagcgcggaaatcccgcagatgaagacgcgcgacggcagcccggcgggcggttcgtccgctttttccagggtactgataaagcgctggtagagattggcgcggtgccactgcggctgccccagctcggcggtgtagctcaccagcgcctgccacagcggcgcctgccactgctgggcatcgccgagaccttccacccgctggccggcctcccagcgcatcagccactccgggcgatagacgaggtactggtcatagaggtccgccacccgggcggccagctgaaacagcttgcgcttgtcgccgtcatcactcagatactggcgcagcaggataaaatcgtcttcctccaggtgctgcggcaggagggtcatcagcttccagctcatgctctgcttgctgaaggcgctttcgcccggaatatctttcaggacgcgcacgaacatatcccagataaagctcgccggcagcgggaactcgatattggcggcaatcccaaagcgcgcggccagggtcatctgcagccactgcgccatgccggtactctgcaccagcaccatttcggcctgaaaagggtcatccagccgctggcgctcgacgataaactccatcaacgcctcgagaacatccagccggtttgagtggtatacccttaacataattgctcctgactactggctgaccgggcaatgcagccgggtcatctgcacccgctttgcaacgggtctactgatcgttaccgtgatgctgacacatctttgcctcgatgtctgcatacggcttacctgcccgcgtgccggcgacggcggcgcggagagctggctatagcgccacgcgtcgcgccacagttgacgggtctggttcaactggacaattccttgcgccattccgcgctgatagccgcccagcgcggtgaccgtcagcaccatcagcgccatcgccagcacggtctccggcaggctaaacccccgctgacgcttcagggcatttgacataagctcgcctctctgagcgggcaaaaatcgctccagccgtgggcggaaaaacgcacctgcccgccgcgcacctcgccggactgccagacctgcacctcgccgctggcgctgctgagcaccagtgaaccgtcgccgaagatacgcagacaggcgcgccagccctgcggcgcctgctcccggcaggccagcgccacctgcgccgaccagacctgctgttttccccactgcagcgcggaatgggctatcgccgtatcgcggatcgcctgcgtttcgctggcggtttgcgccagcagcacccgctgctgcaggttaagcccctcgagtaacaggctgccgagggtcagcaacaggagcaccatcagcagcgacgacattccacgctggcggatcacaggttataccccgtcacccgctgctcaacctcgctcgtcaggcccgtctgttgcgcggagcgcgccgccagcgtcacgctcagctccggcgcgaagcccggggtgacctgacgttgtaccgagaagcgcgtcaccacgatggcggccgggttggtgattttctcccatccgccgccgcggcagtcgctggccccgcgcagggtctccagcgcgccgtcgcgcaggcgaaagccggtgctctccgccgctgccgcgggggaagtttcccatctcccgttgctgttcgcatcccagcgcacaatcagacactccccgccagcggctagctccagcccggctccgccgcacgctccccggcagtacccggcgcgctgcagatgttttcccacggcatgcacacgctgccacagctcgttctccagggccagctgttcgccctggcgcagaatatgacgctgcagggcaggcagaaagcggcaggcccccatcagcagcagcgagccaatggccatggcgataagcgcctccgccagggaaaatccgcggcggctcactgacaccctcctgcgctgtcgctgcggcataaacgaatccgcccccagtgtgagatcacaatgctccagctgccggccgcgctctgcagccgcagattccccgcccaggcggtgctgcgcagaccataaaaccccagaccaggcgtaacgccagccagagtgatccccggccagcgcgggcgcagcgtgaaggatgtccccgaggcgcagtcaggcccctccccctccgcgctcaggcaccagcccacttcgtcctggccgacgcgaagcacgcggtcccggttgtaggcgttggcgtcatcgcgcagaaagagcagaaaatcccgcacctggacggcggtttgccacagtcgttgctgctgctgccagcgctgccagccgtacaggccgccgacgctgaggatcatcatcagtgtcagcgttaccagggtttccatcagggtgtagccatgttctctgttcatggcgtcgagtatgccgcggcgattggctctggcgcgacgacggaaaatagctttcccggccagatacgcaaaaaagctttgcatactcgacagaaggacatttttttgcgagcgtctacccaacttcgcccaccgcaaccacctgtggcctggggggcaggagaaaacaaccttctcccggtggtaacggaaagcgctcccatcgggtggtgcgaagggcataaaaaaaccggcgccatcgggcgccggttagtcaactctgctgggggttaaatcgccaccggcgctttaatgcccgggtgcggatcgtaaccttcaatctcgaagtcttcaaagcggtagtcgaagatcgacgccggcttgcgtttgatgaccagcttcggcagcggacgcggttcgcggcttagctgcaggttggtctgctcaagatggttgctgtacagatgggtgtctccgccggtccagacgaaatcaccgacctgcagatcgcactgctgcgccaccatatgcaccagcagcgcatagctggcgatattgaacggcaggccgaggaacacatcgcaggaacgctgatacagctggcaggagagcttgccgtcggcgacgtagaactggaagaaggcgtggcacggcgccagcgccattttatccagctcgccgacgttccatgccgagacgatgatccggcgggagtccgggtcgtttttcagctggttcatcaccgtgctgatctggtcgatatggcggccgtccggcgcaggccaggaacgccactgtttgccgtagaccggccccaggtcgccattctcatccgcccactcgtcccagatggtgacgttgttctcgtgcagataggcgatgttggtgtcgccctgcaggaaccacagcagttcatggatgatggagcgtaaatgacagcgcttggtggtcaccagcgggaagccttcctgcaggttaaaacgcatctgatggccgaaaatggagatcgtgccagtgccggtgcggtcattttttggcgtgccctcggtgagcactttctgcatcaaatcaagatactgtttcatggttcctcaagaattctgttgctgcggacggtggcggtaagcccaaaccatcataatgatacccgcaagcaccatcgggatcgaaagaatctgccccatgctgatgtactgcacccagccgccggtgaactgggcgtcgggctggcggaagaattccacgatgatgcggaacaggccgtagccaatcaggaacagaccggaaacggagccggtagggcgcggtttacggataaacaggttgaggatcaggaacagtaccacgccttccagcgccagctcgtacagctgcgacgcgtgacgcggcagcgcgccgtaggtatcgaacagcgattgccattccggatgcgtcggcagcagcgccaggtcttcggcacgggagcccgggaaaatcatcgtgtagtggaagctcgggtctacgcggccccacagctcgccgttgataaagttgcccagacgcccggcgccaagaccaaacgggatcagcggcgcgataaaatcggagacctggaagaaggtgcgtttggtgcgtctggcgaagataatcatcaccaggatcacgccgatcaggccgccgtggaacgacatgccgccgtcccagacgcggaacagatacagcggatcggcaagaaataccggcaggttgtaaaacagcacgtagccgatacggccgcccaggaagacgccgaggaagcccgcgtagagcaggttttccacttcatttttcgtccagccgctgcccggacgattcgcccgacgggtggccagccacatcgcaaagacaaagcccaccaggtacatcaaaccgtaccagtggagggagaccgggcctagagaaaaaatgaccggatcgaactccggaaaatgcaggtagccactattcatctgtcaccataaagacttgttattccgccgaaagtggacagcggtgatgatccatacccgaacaaaacgggcacgccgaaggaggcgaatcatagcataagccacaagagcgatccgcgccgaacgtgtaaaagatatgtatacggatgctaacagaatgccgttttcccggcggtaccctactttgccggagggtgcgagcagaggatccccgggttacggcttacgcctcacccgggctggcgctaccgcccgccgcggatcaggccgccgagaccgcgacgctccataaaggccgccacctgatggcgcacctcggcggtcatctgcgcatcgaggctgcgacgcgacagctcctgcgcctcttcgatatcaatgcggcgcagcagatacttcaccctcgccaccgagcggccgttcatcgacagatggcggtaaccgaggccgataaggatcgtcacgcacatcgggtcgcccgccatctcgccgcacaggcgcagatcgatgccaaagcgctccgcgtcatgggcgatcatcgccagcgcacgcaataccgcaggatgcaggctgtcatacatgctggcgacccgggtattgttgcggtcgacggccagcaggtactgggtcaggtcgttcgtccctaccgagataaaatcgatccggctggccagctgcggcagcataaagaccatcgacgggacctccagcatcacccccaggcgcggacgtgggatggcgtagccgatcatctcttccacttcccggctggcgcgatcgatcagccgacgggcctcatccacctcctccagactggtcaccatcggcagcaaaatgctgaggttgccggtggcggcgttggcgcgcagcatcgcccgcacctggatcaaaaagatctccggctgatcgagggtgatgcggatcccgcgccagccgaggcacgggttctcttcgctgatcggcatatacggcagctgtttatccgcgccgatgtccagggtacgcagggtcaccggtttgctgttaaacatctgcagcatgccctgatactgggcgacctgctcctcttctgaggggaagccgctctgcagcataaagggaatttcggtgcggtagaggccaatgccgtcaacaaagctgccgagcttctcttcgtgctccgggcttaagccggcgttgagcatgactttcacccgctcgccgcttttcagctccgacgcgcgctggagatcgtcctccgccaggcggctgagttcgttctcttcgctgataaggcgctgatactcctgcaacaggacaggttcaggatccaccagcagttcaccgcgatagccatcgacaatcagcgtatggccatgcagcagcgagggctgaatatcggcgcccatcaccgttgggatgccgagggcccgcaccataatagcggcatgggagttggcggcgccatcgcgcaccaccacgccggccaggcgatcctgcggcacttcggcgagggtggtggccgacagctcgtccgccacgaggataatgcgcgccggccaggtgttgggcccctgaatactgtcgtcgagatggaacagcagacgctggcccagggtacgcagatcgccggcccgctctttcaaatagccgtcgctcagcgcggcaaactgttcggcgaacttctcaatgatctttttgacggcccactcggcgacggcgcctttgtcaacttcggcaaacagctcgcgacgcaggcgggcgtcggagagcaggtgcgagtagagatcgaagatcgccgccgtctctttttgcgccccggcggcgtagcgtttgctgtagcgacgaaactcgttggccgcctcttccagcgcaccggtcaggcgttcgcgttccgaggcggtgtccagcgtcgaggcttcatacacctgctccatcagcggcaggctgacgtccatccagccctcggcgatcgccaccccggaagaggccggcagagcgcgaatgcgcgtttgacgatactggccgaacagggcgttcagctgggactgggagaggatcgccgccatctgggtggcgagggtgacgaggaaagactcttcgctttcatcaaactgacgcagctcgcgctgctggaccaccagcacgcccagcagctggcggcgctgaatgatcggcacgccaaggaaggcgcggaagcggtcctctttgacggcggggatatatttgaagctggggtgtttttgcgcatcggcgaggttgatgggttccgccaggcggccaaccagccccaccaggccttcatcgaacgccagcgcaacggtgcgcccgcgaggtttttttaacccgcgggtggccatcaggtaatagcagcgtcggtcattgtcagccaggtaaaccgagcagacttccgtctccatcgcctggcagacatccgtcaccagaatatccagcgcctcgtttaaacgcggcgcgctcgcgaccttctcgactatttctcgcaaccgagtgagcataatgtgcgtggcttaacctcttttacgtcgataagcaggcgcgttttgcggcttaggtgcgctctccgccagcgacatggtcacgctggcgaactctttcatcacccggcggtagacgtcgcgcttaaacgacaccacctggcgaaccgggtaccagtaactcacccagcgccaaccatcaaattcaggtgtactgctggtttgcatattgatgtccgcatcgttgccgatcaactgcaaaagaaaccacttttgtttctggccgatacaaaccggctttgtgtcccaacgcaccaaacgtttaggcaacttgtaacgcagccagttacgggttgaggccaggatccgcacatctttacggcttaacccgacttcttcaaacaattcccgatacatcgcctgctctgcggattctcctggattaatgcccccttgcgggaactgccacgagtgctgaccatagcgccgggcccacatcacctggccctgacgattacagattacaataccgacatttgggcggtagccatcgtcatcaatcaccggactacctcaagataagcttcaatgtgaatgattgtttcacactcgccggaaacggtaaaccactctgttcgcacactgagaacggataacatttgaataactcacagtaattgccagagttataaacaatgaaagcgcgtgacagccgattttattcactttttctgtggatagagttgtgaagaagtacggaattaacccgggaaaacccagagtaatccgaacatcgcatcgctagcatctaaaaataatagtatcatattcataaagttagaatatattcctttcacacattacagcataacgtgacgatcatcacacatgcgatccgccgactgatgaaagatcgagcaatgtcgattttatccacagattacacgcaggccaccggcagattttctctaaaaattcgattttcgtcgcacgtcaaggctgtaaatcgaaccagtagtgagtcttttccccagttatcccacttttctgtggataacatggtgtaagatcctgtttattgtcagtgaccagttctggaaaacccgtttacaccgttttcataagccgcatgatgagtttaaaaagccatataaatcatgagattggtatagttactcagaaaacggtaaactctatccacaacgcgcaaaattagcgctcactttttaaccaaaggtattaccctatgcccgctatcgctccgctcgcctcaccgccgcaaagtcaggaacagctgctggcccaggcccgccagctggccggctattcgctgggcgagctggcggcgctggcggggatccccattccgcgcgatctgaagcgcgataaaggctggacgggcattctgctggagctgtggctgggcgccagcgcaggcagtaaacccgagcaggatttcgccgcgctgggggtcgagctcaaaacgatccccatcgacagccggggacgcccgctggagaccactttcgtctgcgtcgccccgttaaccggcaatagcggcgtcacctgggagagcagccatgtacggcataagctgcagcgcgtcctgtggatcccggtggagggtgaacgcaccatcccgctggcggcgcggcgcgtcggcgcaccgctgctgtggagcccggacgaagacgaggagcgccagctgcgcatggactgggaagagctgatggatctcattgttctcggtgaggtagagcgcattaccgcccgccacggcgaggtgctgcagttaagaccgaaagccgccaacagcaaggcgctgaccgaagccatcggcgcccgcggggagacaatcctcacgctgccgcgcggtttctatctgaaaaagaattttaccgccgctctgcttgcccgccatttcttgttacaacacgattaattttttgttctgcgttgggggttgcatataattgctgctttctattttgcaggactttgaacaatgttatttgcatggataaccgatcctaacgcctggctggcgctgggcacattgacgctgttggagatcgtgctcgggatcgacaatattattttcctctctctggtcgtggctaagctccccaccgcccagcgcgcccatgcgcgccggatcggtttgatgggcgcgatggtcatgcgtctggcgctgctggcctcaatcgcctgggtcgttaagcttaccaacccgctctttaccgttttcggtcaggagatctcgtttcgcgatctgatcttgctgctcggcgggctgttccttatctggaaagccagtaaagagatccatgaatctatcgaaggtgaagaggaggggctgaagaccaacgtccactccttcctcggcgccatcgtgcagatcatgctgctggatatcatctttagcctcgattcagtgatcaccgccgtcggcctgtcggatcatctgttcatcatgatggcggcggtggtgatcgcggtgggggtgatgatgttcgccgcgcgacccatcggcgattttgttgaccgtcatccttcggtgaaaatgctggcgctgtcgtttctgatcctcgtcggctttaccctgatgctggaaagcttcgacgtccatgtgccgaagggatacatctatttcgccatgttcttctctatcgcggtggagagccttaacctgctgcgtaataagaaaaacccgctgtaaaccacaaaattgcagcctggtcacaggctgcaaccctttttcagactttactgctttttatgtctcacaaatcaggctattaatagacgggtatggggtgcagctactgaagaggtgttgacgatgaagaaatgggcagtattgatttccgccgtaggactggcgttctcggtttccggttgcagcagcgattacgtcatggcgaccaaagatgggcgaatgatcctgaccgacggtaaacctaccgtggatgacgataccggtttaatcagttacgaagatcagcagggtaataaaatgcagatcaatcgtgacgacgtttcgcaaatcattaagcgttaatctttccctgtcggccccagcttctgttgacgctgcgcttaccgaccaccagtcttttgagaagagtcgggatataccaggacgccgcgggtttcacccaccgcccctcctcgtcacccggcttttttgattttttacttcctctttttctcaccctctgccatgttgatactcctttgtcggggaatgcctgaccttataaataaaaaggaagctggctatgcagtatcaccgtatcccacacagttctcttgaaatcagcaccctcgggctgggaaccatgacttttggcgaacagaatagcgaggccgatgcccaccagcagctcgattacgcggttgccaacggcatcaacctgatcgatgtcgctgaaatgtacccggtcccgccgcgcccggaaacccaggggctgactgaaacctacgtcggcaactggctggcgaaacgcggcaatcgcgaaaagctggtgctcgcctcgaaagtcagcgggcccgcgcgcaataacgacagcagcattcggcccaatcacgtcctggaccgcaaaaatatccgcgaggcgctgcacgccagcctgaagcggctgcagaccgattatctcgatttatatcaggttcactggccgcagcggccaaccaactgctttggcaagctgggctatacctgggccgacgccgcgcccgccgtgacgctgctggataccctcgaagcgctgaccgagttccagcgcgccgggaagatccgctacatcggcgtgtcgaacgaaaccgccttcggcgtgatgcgttatctgcacctggcggataagcacgacctcccgcggatcgtgacgattcagaatccttacagcctgctgaaccgcagctttgaagtcggcctcgcggaagtgagtcagttcgaaggcgtggagctgctggcctactcctgcctggctttcggcacactgaccggcaagtatctcaacggtgcgaagccggcgggggcgcgcaatacgctgttcagccgctttacgcgctacagcagcgagcagtcgcagaaagcggtagcggcctatgtggatatcgccaaacgccacggcctcgatccggcgcaaatggcgctggcctttgtgcgtcggcagccgtttgtcgccagcaccctgctgggggcgacgaccatgacgcagttgcaggccaacgtggaaagtttgcagcttgagctgagcgaagaggtattagcggagattgaggcggtgcatcaggtttatacctacccggcgccgtaagaaagcaaagccccgggtaaggcgtatacgccttacccgggctaccgaagagcagatattggcgaccccatcgcccagtcaagcgcagcgcaagccgggaggttatttacgccgcccccagacccacagcgcggcgatggccacggcgaataccgcgccaaagcctatccccacggcgaccggtggaacgcccacgctcaccgccagggaatagagccccagcatcagcagcatcgccacgttctcaccaaggttctgtaccgcaatggcgttacctgccccgaccgaatgtttcccacgctcctgcagcagcgcgttcagcggtacgataaagaacccgccgaacaccccgagcagcagcagcagaccgaacgccggcagcagcgactgctgcaccgcaaaggctatcaccgcgataccgatcaaaatcccggccggcatacagcgcgacaccgtctccagggtcaccagcttcgccgccgccccggcacccagcacaatccccaccgctaccatcgcattaagataggtgggcatggcgttgctggtaatgcccagcgccaccggcacccagatcaccagcaggaaacgcagggtcacgccagcgccccagaacaggctggtgcccatcagcgaaaagcgggtttcgccgttgcgccacagcgtccggcaggcgctgaagaagctgtgcgtcattggcttaaaacgccacgactgccccggacgcgccgccggcagcctgggtatccacaggttagccactaccgccccgccgtagaccagcgcgcagacgatcagcgccgccagcacgtgccagtcggcgaggatcccgccggccatggagcccagcaggatcgccgcgatggtcgaggactccatcagtccgttagccttcactaacttatcgccggtggtgagttcgccgagaatgccatacttggccggcgaataggcggcggcgccaatccccaccagcgtatagccgataaacggattgacgccgaagcagatgcagccggcgccgagcagtttcaggccgttggccaccatcatcacccgacctttggcaaagctatcggcgaactggccgacaaagggggcaaagaggatgtaagcgcccacaaacaacatctgcaggaccggctggctccactccggataatagagctgcttcatcagcgccagggtggcgaagagaagcgcattgtcgccgaaggccgacaggaactgggcgcagatcaccgccagcatccctttcgagtacagcgaagggttagtatgtactgactcactcatgggttgtttccgcctcgtcgaccatatttttcagggtgacatagtctggcttgccgctgccgagcaccggtagctgtttcagccagcgtatatctcgcggcaccgccagctccggtacgccgtgctggcgagcgtagcgcagcagggcttcacgagtcagttcattatcggtggtaaacagcaccaacgcctcgcctttgctggcgtcctgtttaatcgccgtggcgtgcattttgtccggcgacgcgccgagggccacctgctccaccatctcgagggagatcatctcgccggcgattttggcgaagcgcttcgcgcggccctgaatgcggacatagccctgctcgtcgaaggtaacgatatccccggtgtcataccagcccgcttccatctcgccgtgctggttttccgccgcaggcgcttccagcacgccggggttttccacccgcaggtagcctttcatgatgttcggccctttcagctgcagccgccccccttgatcaatgcctggcatcgccagcaggcgggcgtccatccccggcaggatgcggcccacggtgccgaccttcgccgccatcggcacgttaatcgagaccacaggcgcgcactcggtcacgccatagccttcgagaatgcgcaggccgaatttatcctgccacagctgtttggtgctctcctgcagcttctccgccccggcgaccacgtagcgcaggcggtagaaatcgtacggattggcgaaacgggcatagttggcgaggaaggtcgaagtgccgaacagcaccgtacagttgcgatcgtagaccagctccggcaccacgcgatagtgcagcgggctgggatagagaaacacttccgccccggtaagcagcggcgtcagcaggccgacggtgaggccaaaagagtggaacagcggcagcgccgacataaagcggtcattggcggtaaagtcggcgatagttttgatctgctcgacgttggacagcagactcttatggctgtgcaccacccctttcggattgccctcggaaccggaggtgaagaggatcatcgccgcgtcttccggctgctgcttaacctgcgccagacgcggcgccagcagatgagcaaaaatccacagtttgtcagcgagggtgatatcgcctttaagatcttccaggaatacccagcgcacctgggccagctgctccggcaggtgccagagtttgcctttatcgaggaaggtgcgcgaggtgaaaatggtgttgagctccgcggcggctatcgcgctgctgagccctttcaccccggcggtatagttcatcatcgccggaatacgcccgcgggcgatagcgccgaaaatcaccgccgcgctgatgccggcgttaggcagcatcaggccgatcttctcgcccggctggctgtatttttccagaatgcgggcgacaaacagggttttggtcagcagcttgcgataggtatccggctggaagttgatatcctccacgcagggtttgcgcgcgccgaagcggtcctgcgccgccagcagcgactcatacagggtttcccgcgggcgcaccgccatccgggcttccatcatgatctgatgcagcatctccccggcgattttgcgccggtcgcgggcgcgcggcgcctcgggcatcggcagatgggtgggcggcaggagatgcagctgaatacgcgggaacaggcgacgtttcaccagccccttcaaccggctgaagggcgtcagttcggcgccttcaatacgcagcggcacaatggtcgcctgcgatttggcggcgacaaaggcggcgccgtcataaattttcatcagcgagccgctgaccgaaattcgcccttccgggaaaataaccaccggccgcccctgctcaatcaggcgcaccagatgtttgatcgacatcggcttggtcgggtccagcggcacaaaatcgataatcggcgtcagcgcgcgcataaaccagcgctggctgattgaggtatagaccgcaaaaaccggtcggaccggcaaaaacagcgccagcagaatgccgtcgaggaaagagacgtggttcggggtgattaagaccttttgctggtataaagcctgcgtgtcgccggtcagtctgacccggtataaccccttgaacagcagtctgaaaaatcccaaaagcataacaactccatgtgaccggttgatgagtcaaagcaggttacacgagaaggcatgggaaagcagtgcagcggggggattttcggaataaaaaaaacctgcgcatccgcgcaggtcggtgtaagacgttcagtacgaagagcgtacctgagaaactcacctatcaatacctctgggatctcgattgtcacgttttttggccgtaacgggccagcgggaaaacgcaagggagtgagcctaagtgcaacgagttattacgattttcgctatctgtaacaacgccgatagcgggcaaaaaaaaacctgcgcatctgcgcaggctggtgtaagtaaagtggtcaacgtgacgttgactccacctatcaatacctctgggatagccagaatatcaaccggatccgcgaacaaaccagcgaacattcgcaacagcgcatcgcaaagtgtaagcaaaggtttgtatttccctgcgtcggtttcaattaccgatcgcgtcaatgtaaacaggtcaccgataagcccgcgctgaatcacatttgcgccattccttcgccgccgcgccttgaatctgccgctctttcccgtaacatagcagtatgtaaacgcttaccctagaaaaggcatggtatggcgactattaaggatgtagcccgactcgcaggagtctccgtcgctaccgtctcccgcgtcatcaacaactctcccaaagccagcgaagcttcgcgtcagtccgtgggcgcggcgatggaaaccctgaactatcaccccaacgcgaacgcccgggcgctagcccagcagtcaacggaaaccgtcggtctggtggtgggcgatgtctccgaccccttcttcggcgcgatggtcaaagccgtcgaacaggtggcctaccgcaccggcaattttttgctgattggcaatggctaccacaacgtgcagaaggagcgccaggcgatagagcagctgatccgccatcgctgcgcggcgttggtggtgcacgccaaaatgatccccgatgaggaactcgccgggctgatgaaacagatcccgggtatggtgctgatcaaccgcatcctgcccggatatgaaacccgctgcgtcgcgctggacgaccgctacggcgcctggctggcgacccgccatttgatccagcaggggcacacgcgtatcggctatctgtgctcaaaccatgatatctccgatgcggaagatcggctgcaggggtactacgcggcgctggaggagagcggcctgccgtgcaacgaccggctggtcacgtttgccgagccggatgaaagcggcggcgaacaggcgatgaccgaactgcttggccgcggccgccactttagcgccgtcgcctgctataacgactcgatggccgccggcgcgatgggggtgctgaatgacaacggcatcgacgttccgcgggagatttcgctgattggcttcgacgatgtcctgatttcgcgctatgtccgcccgcggttgactaccgtccgctatccgatcgtcacgatggcgacccaggcggccgagctggctttagccctggcggagcagcggccggcgccggagatcacccatctgttcagcccgacgctggtccgtcgtcactcggtggtcgccccgcaggaaggcgataagtcatagcgatagaggtgcacggcggtggccgggtaatccagcccctcgccgatgtagcgccagccgaagcgttcatagaaatcccggcaggcggagtagagatagagctcccgaaagcccgcgcagcgggcataatcgatcacatgccgctgcagttttccggccagcccctgaccgcgggcggcgggcgcgacgaacagcgccgccagccagggaaacagatcctggcggctgatcaaatcgcagcgccagaggccaatcgtgccgagcaactgctcgccttccacggcaataaaggtcaacggcagcgcctccgccgtctggctatgctgcacgatgctggcgaagaattgccgcggcagcgtctcgccgccaaaggcctgccacagccagtcggtcacctgcggggcgaactgcggcgcagcgtacagcggcaggatcgtcataccagcttcccctgaaaaatcggcactgagtcgaacagatagccgtcaaagtcgggggcgtcctcatcggacagctccagcaggctgtttttgacgttttccagatgctgccacatcgcctgccaggcgcccatcacatcgcgacgccgcagcgcggcgagcagggtctgccggtcgccgagccatttcagccgccaggcgcggctggcaatatgcacattgaactgctgccacagcgggctgctgtccatctgcagccagatccgctctaccgtcgccaacagcatctggttctgcgtcgccccggcgagcaccagatggaacagacgagcgttatcctgcgcggtgtcgttgagagcgattgcccgctgctcctgttcaataatccgcttcagattgtcgatatcggcgcgggtggccattttcgcggcaaaggcggcgatgttgctctccagcagctggcgcgcctggagaatttcaaacgggccgacgtcgctgctgagcagctgctcctcttcgctgtcgttctcgtggggaatgcgcatgacatacaccccggatccctgacgaatatccaccgtaccctgcagctccaacatcagcagcgcttcgcgcacgatggtccggctgacgccataggtttcggcaatatggcgttccggcggcaaacgcgacccgaccgggtagcgcccctgcgcgatctgggcgcgcaggtcatcaccaatctcctgatagggcttcttttccggcggaactatcgctttttccacaaaatcacctgtgcgttacatgcctgcgagtcaaatacgccgctatattagcaaatattgcccccggctagcggtattcatcatcgatatccagcaccagttcacgccgttcgcccagttgacgaaaccagtgcgccgaggctttgggtcgccgggcgcgatggttttgcagatcgatttcgataagcccgtagcggtttttaaaggcgttcatcggcgatacgttgtcggtaaacgcccacagcatatagccctggcagttggcccctgcctcgcgggcgcgcagggtgtgccacagatgttcgctgataaaacgaatgcggtagctgtcatcgatgacgccttcgcggttacggaactggccttcgttttccacccccatcccgctctccgccacgaaccacgggatgttgcgatagtcattttttatccgcatcgccatatcaaagatgatttgcgggtagatttcccagccgcgggaggcgttcatccgccggccgggcagctcaaacggctcataataccaggccggatggaacggggtatgcggatgccaggcccgcgacggggctttgacccggtgcgggtagtaaagattaatccccagctcatcgacggtgtgctcgcggataaccgccagatcttcctcgctggtctcccacgtcacctgatgctgctcaagcagcgcgagaagctccggcggccagacgccgtgcaccagcgggtcgaggaacatgcggttgtagaacagatcgtagatctccgccgcgcgcaggtcatggggggcgcgtgagcgtgggtaggtcacctccggattgaggatgcagccgacggtcccgggatagccgagctcgcgaaaccgcttcacgacgctggcggtcgccagcaccttatgatagttccactgcatccaggtgctggtgttctgctcatagggccagcgcagagcatccagatagacccgggtctgcaccacaattggctcattaaaggtaaaccagcgcgtcaccttcgggtggtagcgggcaaacaccttctccgcgtagcgcacaaacagctcaaccaccgttttcgacccccagccgccatacttttccagcagatagccgggcaattcataatgctcaaggcagatcatcggcgtgatgccgttggccagcagcgcatcgaacagctggtcgtaataggccgcatactcctcatccaccgtgacgttttcgtagtcggtcagaaagcgcgaccagttgattgaggtgcggtagtgggtcagcccggccagcttcatcagctgcacatcttcctgaaagcggttgataaaatcggtggccaccgccgggccatagccgttatgccagacgtggcgatcgtttttgtaccagagatcgggccaggagtcctgccctggttttttcccgctccagccttcggtctgccaggcggaagccgccgcgccaaggataaaatcatcgggaatggtcatccgtacggtagtcataggctcctcagacagggttggcggtttgttgattgtctacctgacgctgcgcggcatcggcacggcgggaggcgattttgacgaaaggcagatagataagcaccgcgacgacgatgcagataagctgggtcaccaccgcccccatcgagccggcggtggagagccaggcgttgatcagcggcggtgtggtccagggcaccatcaccaccgccttgccggcgaagccggtcagggtggcgaaatagccgatgctgccggtcaccagcggggtgatgataaacgggatggcgaggatcgggttgagcatgatcggcatcccgaagatcaccggctcgttaatattgaacagccccgggcctatcgacagcttggcgatctctttcatctctttgcgcctggtggcgatcatcaccgcaatcagcaggccgatggtcagccccgagccgccgatgctcatgtagacatcccagaagggcatcgtgatgatgttcggtacctctttcccctgctcaaaagcgctcatattgacagtgatcgctcccagcagcagcggctcgcggatcggcttgatcatctggttgccgtgaatgccgatcacccagaacagctgggcgacgaacatcagcagcaggatccccggcaggctctgcaccacccgctccagcggctgctgcaccacctggtagaccgcatcgtagagatacattcccgtcagctggtgaaagagaaaaccaaaggtggcgatcgcggtggtggtgatgatcgccgggatcagcgcggaaaaagaggcagagacgttcggcggcacggtatccggcattttgatcttcagtcccttgcgcccttccagccagcagtaaatctccactgacagaatggcgatgaacatcccaaggaacagactgcgggtatcggaaaactggcgcagcaggacatctttcaccacgtgcatctggccatcgaccatcatctccaccgtggtcggcgtgacgcagataaagcagatcaccgccaacaggccgggaaacaggcttttgatgccgttgatccgccccagctcaataccgatcagaaacacggcgccgatattgaggaagttgagcgtagcgtagttaagcgcgctggtgatcggcttcagcgccgcaagaaaggagagcgaggaaaagctggcgagcccattcttcggatccagcaccatattggagatcagcaccgaaaaggccccgacgatgatcaccggcatcagggtaataaacgccgatttgatcgccataatgtagcgatagctgttgaatgtcgtcgcgaaacgccccagcgcgtcgatcagtttgtcctgtaatgccataaaagagtacctcagtgtaaagggcttattgcggccaggtgaacagccagagacttttggcataccaaaacatagtcgccaggcaaaaatagttctgtgacagcgctcgcaacgcgcacagtggtatcccaaatatccaataaaatcgacattggcataccagagtctgtcggctcgtcagttcctgccaaaagcgtgatcgcgatggtttttccgccccgccccgtcgatatgtcccttttcggtctgtgataaactgcgctttaccacgtgaaatcaggaatcgatgaatggctacaatgctggatgtctcaattcgcgcaggcgtctcgaaagcgacggtttcccgcgtgttgaacggcacaggtcaggtgaaagagagcacccgccaacaggtctttaaagcgatggaagagctgggctaccggcccaatttccttgcccgttcgctggccaatcagaccagcaatagtatcgggctggtcgtctccacctttgacggcttctactttggccgtctgctgcagcaggcgtcacgccagaccgaagcctggggaaagcagcttatcgtcaccgacggccatgatacgccggagcgcgaagaggaagcggtgcagatgctcgccgaccggcagtgcgatgcgatcatcctctatacccggcacatgagcgagaaggcgatcatgtcgctgattaactcgatcgccatgccgctggtggtgattaaccgcgatgtggcgcaggcccgcgaacgctgcgtgttcttcgaacagcaggaagccgccttccaggccgtggagtatctgattacccagggccaccgcgatatcgcctgcatcaccgtcccgatgcatacccctaccggccaggctcgcctgcagggctaccgcaacgcgctgataaaacatggtattgagtgggatccgagccgggtgaagtatggggactcgacgatgacccgcggctacgaactgtgccgggaactgctggacgagaaagcccgcttcagcgcgctgttttcctgtaacgatgatatggcgctgggggcgtcaaaggcgctgcatcaggcggggctgcgtattccacaggatgtgtcgctgtttggcttcgacgatgcgccaagcgcgaaatggctggagccggggctgtcgacggtttatctgcccatcgacaacatgatcactacggctatcgaccaggcgatcaagcttgccaatcagcagccgatagaaacgatcccgccgtttaccggcacgctggtgcttcgcgagtcggtgacgacgggacctttttttaaataagctctaaggccagcagctcctggatggtctggcgacggcggatcagccgcgccttgccgccatcaaacagcacctccggcagcagcggacggctgttatagttggatgacatcgaagccccgtaggcgccggtgtcatggagcaccagataatccccaggcgctaccgccggcagcaggcgggtctcgactttgcccccctcctgctgggtaaagacatccccggattcgcacagcggcccggccaccacggtttcgacctgcggcgcggcgctgagatcccggccatccgccgccagagcggtgatatggtgatagctaccgtacattgccgggcgcatcaggtcgttaaagccggcgtcaatcagcacgaagtgacggctgcccatctctttcacgctgcgcacctgcgacaccagcacgccggactcggccaccaggaagcgtcctggctcaatctccagtttcaccgggtgccccagatgggccgcgatctgctcccgggcgcggttccacaggccataatagtgggcggtgtcgatggcctcttcaccttcgcggtaaggaatcgacagaccgccgccggcggagatggcctgcagatcctggccaaagtcgacgacctggcgcaccatcgcgccgcacacctgctccaggtgaccatagtcaacgccagagccgatatgcatatggatcccgaccagctgcagctgatagcgacgcatcacttccagcgccgccggcaggtggctgtaccagatgccatgcttgctattctcaccgccggtattggttttctggctgtggccgtgaccaaatcccgggttgacgcgcagccagacgcgatggcccggcgacacctcgcccagctggctcagcatgtcgatcgagccggcgttcaccgggatctgtaacgccttcacccgatcgagggtggcgtcgtcgatcagatcggcggtaaagacgatatcctctggattctgctgcggatcgtagcctgccgccagcgcccgctcgatctcccccagcgacaccgagtccaccttcaccccctgctcacgcatcagacgcagaatatgaatgttagagcaggctttttgcgcaaaacgcaccacgtcgaactggctgagctgggcaatctggcggcgaataatctgcgcatcatagacccagaccggacagccaaattccgcgggcaggcgcagcaggttgtctgcggtcaggtcagtatcggtggcgtaaagcgagtgtggcataagaactccggtgcagtgcgtgtgttggtcgctgttttttttcgattacgccacagtggcggacgaataaaaaatatcgttttatcgcgactctatgcaaaaatgatatggttccagccgagcctcacggagaccgcatgccagccgtcaatttgcgtcatatcgaaatctttcacgcggtgatgaccaccggcaacctgaccgaagcggcgcggatgctgcacacctcgcaacccacggtcagccgcgagctggcgcgctttgagaaggtgctcggcctgcagctgtttgagcggacccgcggtcgcctgcagccgacggtgcagggcctgcgtttgtttgaggaggttcagcgctcctggtatggcctggaccgtatcgtcagcgccgccgagagcctgcgcgagttccgccagggcgagctgtcgatcgcctgtctgccggtgttttcccagtcctttctgccgctgctgttgccgccgtttctcgctcgctacccggaggtcagcctgcagatcgtcccccaggagtcgccgctgctggaggagtggctctccgcccagcgccatgaccttggcctgacggagaccctgcatacccccgcgggcaccgaacgcaccccgctgctgacgctgaatgaagtctgcgtgctgcccgccggccatccgctggcggcgcaggcgacgctgacccccgccgattttcagggcgaaaactacatcagcctgtcgcgcaccgacagctatcgccagctgctcgacgccctgttccttgagcatcaggttaaacggcggatggtggtcgaaacccacagcgcggcctcgatctgcgccatggtgcgcgccggcgccgggatctcggtggtgaatccgttaaccgccctggactatgccgatagcggcgtggtggtgcgccgcttcagcgtcgaggtgccgtttaccgtcagcctgatccgccccctccaccgcccgcgctcggcgctggtcgacgcctttgttgcccacctgcagcagagtctgccgcagatcctcacgccgctggcgtcggtcctgcagagagcataaagttgaccgcgtcttccgcgtggatcgccgcggtgtcaaagaccggcagcggactgagctcggcaggcaccagcaggccaatctccgtacagccgaaaataaccccttccgccccctgctccgccagggcggcgatcgtctgcagataataatcccgcgacgcctcgctgaaagtgccgagacaaagttcgtcgaagatgatctgattgatctgcgcccgatcgtcagcctcagggatcagcgtctcgatggcaaactgctcctgcagacgaccgcggtaaaaggtctgctccatggtatagcgggtgcccagcagcgcgacccggcgctgacctttggcggcaatcgcccgtccggtggcatcggcaatatgcaggaagggaacctggcagcgggcggcgatggcatctgcgactttatgcatggtgttggtgcacagtacaatgccttcggcccccgcctgctgcagcccgaccgcggcctcagcaaggatctccccggcgcgatcccagtcgccggcggactggcaggcttcgatgtcgtgaaaatcgacgctgtgcagcaccaggctggcagagtgcaggccgcccagtcgcgccttaacgccctcattgatcaaccgataataggggatcgtggactcccagctcatgccgcctaacaggccaatggttttcatcttctgctccttatgtcgtttctgccagtgaagcaaacttgtgatcaactttccacttctctggccgcgtatttctttttcatgaagagtgggataatttaaatgaaataatgtttcactttaacaacaggatcgccagatgtttatttttcataaagacaccacccttgaagacctcggcaatggcgtaacccgccgcattctggcccatgacggcaaaatgatggccgtggaggtgaattttgccgccggtgccgtcggcccgatgcataaccatcctcacgaacagctcacctatgtgctttccggcgagttcgagttcaccatcggcgaggagacgcgcgtcgtcagcgccggcgatacgttgtataagcggccggggattatgcacggctgcgtctgcctgcagcccggcacgctgctcgatacctttactcccattcgcgaagattttcttgaaggctaatccataacgggggcgttcgccgtccccggttactgcccggcgcccttcaataaaaagatgcggccacaatcattatcctggtaataatatttcccgctcaggtaagcctaatttttcattcctttcaggcgccctttacggccaaaatgcttaccacctcacctttttgaaacatcgtttcgactttgatcacatttccatcctgatctgcatgacgcagaaacaaatcgcaataaaatgaaattaaaacggtgttttataaaaaacagttcagcataaaaaaaggggcttacagcccttacctgctagaccagttaaagaataacccattaattaacaaggacatgttaagcagaggaagcgttcagacatttttgcgttgtcaggcgtaaaaggccgtcagcgcggcgtcaccggatccgtattacaactcgtaagccaggtaggtatgtatgaatgaaaacaagctgctgggattggcatggatatcgccctatatcatcgggctgatcgtctttaccgcttttccctttgtttcatctttctttctcagttttaccgagtacgacttgatgagcccgccggtatttaacggcatcgaaaactatcgctatatgttgaccgaggatagcctgttctggaaatcgatgggggtgacctttgcctacgtctttttaaccatccccttaaaactggctttcgccctcggcattgcttttgtgctcaatttcaaactgcgcggcatcggctttttccgcaccgcctattacatcccgtcgatccttggcagctcggtggcgattgccgtgctgtggcgcgccctgttcgccattgacggcctgctgaacagttttctcgccgtctttggcatcgatgccatcaactggctgggggaaccctccctggcgctgatgtcggtcaccctgctgcgcgtctggcagtttggctccgcgatggtcatcttcctcgccgcgctgcagaacgttccgcagtcgcagtatgaggcggcaatgattgacggcgcctcaaagtggcagatgttcatgaaggtcaccgtgccgctgatcaccccggtgattttcttcaactttattatgcagaccacccaggcgttccaggagtttaccggcccgtacgtgataaccggcggcggtccgacctattacacctacctcttctcactctatatctacgataccgcctttaagtacttcgacatgggctatggcgccgcgctggcgtgggtgctgttcctcgtcgtggcggtctttgcgtcgatcgcctttaagtcatcgaaatactgggtcttctactccgccgataagggaggcaaaaatggctgatattcaacagatggcgccggtgatgagcgacgccgatcgtgaggtcgcccgtacgctgcgccgggaaaaggtgagccgggtggtgcgctacgtcgtgctgatattcgtcggcctgctgatgctctacccgctggcgtggatgttctccgcctcgttcaagccgaaccatgagatcttcaccaccctcgggctgtggcctgcccacgccacctgggacgggtttatcaacggctggaagaccggcaccgaataccatttcggccactatatgctgaacacctttaagtatgtgatcccgaaagtggtgttaacgatcatttcctccaccatcgtggcgtacggcttcgcacgctttgagatcccgtggaagaagttctggttcgcaacgcttatcaccaccatgctgctgccgagcaccgtcctgctgatcccgcagtacctgatgttccgcgaaatggggatgctgaacagctatctgccgctgtacttgccgctggccttcgccacccagggattcttcgtcttcatgctgatccagtttctgcgcggcgtgccgcgcgatatggaagaggcggcgcagatcgacggctgcaactccatccaggtgctgtggtatgtggtggtgccgatcctcaagccggccattatctcggtggcgctgttccagtttatgtggtcgatgaacgactttatcggtccgctgatctacgtctacagcgtcgataagtatcccatcgcgctggcgctaaaaatgtctatcgacgtcacggaaggcgcgccgtggaacgaaattctggcaatggcgagcatctccattctgccgtccatcattgtcttcttcctggctcaacgctacttcgtgcagggcgtgaccagcagcggaatcaaaggttaagagggaaatatcatggctgaagtgattttcaacaaactggaaaaagtctactccaacgggtttaaagcggtgcatggtatcgacctgaagattgccgatggtgaatttatggtgatcgtcggcccctccggctgcgccaaatcgaccaccctgcgcatgctggcgggtctggagaccatcagcggcggcgaggtgcggattggggacaaaatcgtcaacaacctggcgcctaaatcccgtggcatcgcgatggtgttccagaactacgccctctatccgcatatgacggtgcgcgaaaacctcgcctttggcctcaaactaagcaagctgccgaaggcgcaaatcgacagacaggtggaagaagcggcgaaaattctcgaactggaagaactgctcgatcgcctgccgcgccagctctccggcggccaggcgcagcgcgtggcggtgggccgggcgatcgtcaaaaaaccggacgtcttcctgttcgacgaaccgctctccaaccttgacgccaagctgcgcgcctcgatgcggatccgcatttccgatctgcataagcagttgaaaaaatctggcaaaccggcgaccaccgtctacgtcacccacgatcagacggaagcgatgaccatgggcgaccgcatctgcgtgatgaagctcggccacattatgcaggttgataccccggacaatctctaccaccagccgaaaaatatgtttgtcgccgggtttatcggcgcgccggagatgaatattcgtcccagccaactggttgagcacggtggtcgcctgcatttgacgctgggcgatcagcgactgccgctcaacgacctgctgcaaagcaaagttgagacccacaagaaccagcaggtgttctttggcgtgcgcccggagtttgtctctctctccgatgaaccctttgccgagggttcctgcgcgggtgaaatggtacgtgtggaaaacatgggacatgaattctttgtttatctgaaggttgctgattatgagctgaccgcccgcgtgccgtcggacgatgcgaagccgatgattgccaagggactgaatcgcaaagtctatttcacctttgatctcaacaagtgtcacatctttgacgccaaaaccgaacagaacctctctctgtgaaccctggagcataacaatgaaaaacgtgctgataagcgccaccctctccgccaccctgggccttagcgccttctcttcgctagcgcaggacgtcgacctgcgtatgtcctggtgggggggcaacggccgccatcaggtcaccctcaaggcgctggaggaattccacaaacaaaacccagacatcaacgtcaaagcagaatacaccggctgggacggccatctttcacgcctgaccacccagattgccggcggtaccgagcctgacgtgatgcagaccaactggaactggctgccgatcttttcgaaaaatggcgatggtttttacgatctgaataccctgaaagacgagatcgacctcagccagttcgacgccaaagaactgcagtccaccacggtcaacggcaagcttaacggtattccaatttccgtcaccgcccgcgtcttctactttaacgacgaagcatggaaaaaggcgggcatccccttcccgaaaacctgggatgaactcatggcggcgggaaaaactttcgaaagcaagctcgggaaacagtactacccggtggtgctcgaacaccaggacgtgctggccctgctcaactcttatatggtgcaaaaatacaatcagccggccatcgatgagaaagggcgaaaattctcctacagcaaagcgcagtgggcggatttcttcggtatgtataagaagcttatcgacagccatgtgatgccggacacccgctactatgcctccttcggcaagagcaacatgtacgaaatgaagccgtggatccagggcgaatggggcgggacctacatgtggaactccaccatcaacaaatattccgataacctgaagccgccggcgaagctggtgctgggggaatacccgatgctgccgggcgccaccgatgccggactgttcttcaagcccgcgcaaatgttatcgattggcaaatcgacgaaaaacccgcaggcggcggcgaaagtgattaacttcctgctgaacagcaaagaaggggtggatattcttggactggagcgcggcgtgccgctgagtaaagcggcggtcacctacctgaccgaggatggggtaatcaaagccgacgatccggcggtgtccggcctgaagctggcgcaatccctgcccaccgctctgccggtctccccttacttcgacgatccgcagatcgtcgcccagttcggcaccaccctgcagtacatcgactacggtaaaaagtcggtggaagaagcggccgaggacttccagcgccagaccgaccgcattctgcgccgcgcgatgcgctaacctgcccgtctgaactctcccgcggcgcacgccgcgggagggtctgccagacggccctgtcagaagaaatatttaaagcgcacccgggcgccgtagcgttcatcgggattcccgctcttcgctgccgtggaatcgagccacgaggcataggcgccaaggtaaatattgaagttcggcatcgccatgatattcggcaactgccaggaggtgtgcagggtatggatgtcatagcgccccggcgccaggatagcgcaatcgccatcgcattcgctggtcaccccggccatattgaactggtcgattttattgtgcgcatagatatagcccagctccacgcgatgccaaagagcgttgatcccggcgctgaagtcggtttcgtccgccgcgtccagcagggcggtactcagattgaccaccgccccatcctgcggatcgcttttcagggtgttccagctcatggtcagcccgtagccggtgcggtttgactggtcgacccagcgtccgctctggctctgatagccgtaagcattgttgacgagattgctctctatcgccgcggccgccgaccagacgccggactgccatgccgccaccggccgcacgtacaccacatttttgcggttttccagcgcgttaccatgatagttctgatcgacaaacagcgaactgccgtcctccaccagggtgttaacttcgaaataccagttatccaccgttttgctaaacagaaggttaccgccgctgctgctgcgcccgcgcccctctttcatcatgtaaatatagccatagccatcggaatagagatcgttggcggtattacctgaatattcaataaaggtatcctgattcagcgggaacatatcccaggcttcaaagcggcctatttttattttccagtcatcctgctggccgaagaaaaataccgcatcatcaagattcattttgccatccatatccgccagaggctgcacgctgaatccggcatattgcccgtcggcgccattccgtctgccatcgaaacccagcagaatacgaccgttaatatcccagcgctctttatcgccgggcgcccagcttttattcgcgctggttttgaccgacgtcaggctgccggtgcgactggcgccatcgaggttaaattcgacgtcgccataaaattttaattcgccattgtcatttagctgcaaacgcggcgaagcaggcgccgcgcgggcgaccgtcgcggcctgctgctggcctttcagcgtcttaatttccgcctctgcgctggcggcgcgcgcctccgtcgcctttagccgctgctccatttgcgccagtcgctcctccagcgataacggcgcctgcgccataacggatggcagatacagagacgtcagaaaacacccgacccagattttattcatcggtaaacccttttattatggaatgaactgaattttttattaatgggtaacgcacgacgatgcaggcaataataacccgcccatcgtcaaagacgggttattaacgacaacagccttattattattcgagctgccaggcgccggcttcggttaatgccgccgagccgctccaggcaaataacgctaattcacggcggggagcctgcggatagatacggctgctcaggcaggcttcgccgtcattgacaaaaacctccaccgaagagctatcgaaaaatattcgcaggttgagatccgccccggcggtcaacggcacgctgcgcgtcccgcacaggccatactgcggataatgccgctccagcaccagacgctgcagttgggcatccacgtagatgcgcaggccatcgccaaagcgcagaccatactgctcggcgctgctgcgggcgcagtcccagcgcagattcacctccatcgcctcgcagttgtcgaccatcgtcgtctgctggttgttcagggtgctgaccggccacgggaaccaggcgccgcgcaggctctccacttctttcgccgggcgcatctgcaggcggtcatccgcgctcaggctcagctcgcgcggcaaggagagcatgcccgcccagccgtcctgctgctccggcagcggcgattcccacatatccagccagccaatcacgatccgccggccatcgggggtggcgaagctttgcggggcatagaaatcgtggccgttatccatctcccggaattcgccatggcgaataaaatgctggcctggctgccactcgccgatcagatagccgctctggaacagattgcggttgctgaaacccgcggcctgcatcccctgtggggaaaacatcagaacgcgtttgccgttgagggtgaagaagtccgggcactcccacatatagcccatggtgctttccgcttcatccagcacccccgcgtcctgccactggcgcagatcggctgaacggtacagccgcacctggccggtatcgccttcgcgcgcgccgacgatcatgtaccagctatctccctcacgccagaccttcgggtcacggaagtggtgcatacccggcggggtgtcgaccaccatcccctgacgctcaaagtggatcccgtcgcggctggtggccagacactgcacctgatacagattggcttcgtcgccaggatcgccgtggaacttatgcccggtgtaaatcagcgccagggtatcgccatcgaccaccgccgagccggaaaagcagccgtctttatcctccgggccctccggcgccagggctaccggcaaatgctcccagtgcaccagatccttactgcgcgcgtgcccccagtgcatcggtccccactgggtggagtacgggtgatgttgataaaaggcatggtaccagccgtcgaaccacaccagaccgtttgggtcgttgatccacccggcgcgggccgccaggtgatagtgcggataccagcgcagattcagcgcctggcgttgtgtctggagaacctgttcagcccgggagattgtgtaagtcatcattttcactctttttgattcagatagcggtaggttgcgacaccagcggatcggcggaggatttgccggagcgcaacaagaagatggaaataaaggtggtgcagaacaccagcaggcccatgatcaggtaggactgggcgaagccatatttttcatagctgtagcccgccagcggcgacaatacgctggcgataatcgagctggtgcaggcgaagcccaccagatagagggtggaggagagacgtttatcgaagttgaggctgttgtacttaaagatagccaccagcagtatcggcaactccaccgcgtgcagcagtttggtgatggagatcagcagcggcccctccaccagaccggaggccaccatgcgcatcgccatcaccatgccggcgaaaatcagaccgtttttggcgccgatgcggttcaccagccacggcgcgcagaacatgccggccgcctcgaggaacacctggaaggagttgaggtagccatacatctcattgccttcctgcagggtcgcgaactgcgatgagaaatagaccgggaactgctggtcatagacgccgtagatgcaggtgccgatgacgaagaagaccagcgcccaaaagcgcggcagcgtcagcaggcgcagcgcatcttcgagggtcaccttaccgcccgataccgcctcctgcatcgcatgcggcgccgaggagacccgcagccgcgccaacaggataaagaacaccagcccggaacagctggcgacgaggaagtttagctgcggattgatgttaaacagcaggccggcgaagaaggtggccaccgcccagcccagcgagccccacatccgcgccctgccgaattcaaactggctctgacgcgccaccctctcggtgtaagattccagcacgccgatgccgccgttaaaggtcaaaccgatatagatcccgccaaagatgctgcccaacaggacgttgattttcagcaggtggccgaacagcagatacgccggaccagagaggatcagcagcgcggtgatataccagagcagatgtttgcgcagccccagcttgtcctggataaatccatagcaaacttgcgcaaacagcgcggaaactgacagtacggcatagataataccggtatcgcctgccttcagcccaacctcctggtgaagccagatagagagcaaggagccggatgacgaccaggtcacgaaaaagaaaaacagtaaggcactgagcaacgggtagctgtgtgagtgaggcgctttcatcatgacattctcgtgttagaggaatgcaatcatggtaacgttaacaaaaaacaaaacgcaggtggattcgctgcgatatatgatgttaatcacaaaagttaacgttaacataatgaagatgcgatcgcgatcaaaaatcaaccgcaacatagctcacgacggcgatagcagaaaatcgtttcactcttttacatcagcgacttagttgtatagcctgtactctgcggcaatggcggaggaaaaaatggcgtccctgaaagatgtagcaaaactggcgaatgtatctctgatgaccgtctcacgggcgctgaacaccccggagcggctgaagcctgagacactggcccgcgtgcaggccgccatcgccgaaaccaactacgtccccgacctgtcggcgaagaagatccgcggggcgcgcgcaacccccagcaccatcggcgtgctggcgctggataccgtcaccacgcccttttcggtggagatcaccttatcgatcgaagagacggcccgcgcccacggctggaatagctttgtggtcaatatgttttctgacgatcgtccggaagcggtggtcgacctgctcctctcccaccgtccggacggcattatctttaccaccatgggcctgcgccaggtaccgctgccggagaaactgctgactctgccctgcgtgctggccaactgcgaaagcctcagccagccggtggccagctatatcccggacgatgaacaggggcagtacgacgcggtgaaagccctgcttgccgctggctatcgtcgtccgctgtgcctgcacttacccgccagccagccggcgacgatccgccgccgccgggggctggagcgcgcctgccgggaggccggtatcgaaccggaccatctgagccattcgtatatgggccagggcgatgagcattaccacgatatcccggcggtggtgctggcgcatatccgcgagggtaaacctggctttgactcagtgatctgcggcaacgatcgcatcgcgtttatggtctatcagacgctgctgggccaggggttacgcattccacaggacgtggcggtagtgggatacgacaacatggtgggcattggcgatctgtttctaccgccgctctccacagtgcaactgccgcattatgacatcgggcgcctgagcgccctgcatatcattcacggcgacaaccatcgggagacgcgcaaagtcgccagcccgtggttgccgcgcgcctcacattaacgattaccgatgttgcgcagcctctcgcccgccatcaggttgcgctcaatgtgctcgagggtgacattcttggtttccgggatcagccagaaggtgatgccgataaaggccacgttgagcgccgtgtagagccagaaggtgccggcggcgccaatcgcgtcaagcagcgtcaggaaagtggcgccgatgatcatgttcgacacccagttggtggtggtcgagcaggtgataccgaagtcgcggcattttagcggctggatctcggagcagaggatccacactaccggcgccgcgctcatcgcatacccggcaatacacatcatggtcatgccgacggagagccaggagaggccgctggatgcggtgccattgtcgaactgcatcaggcagtagcccagcaccagagtgcccagcgccatcacgctaaagccgattttcagcgctggcttgcggcccgctttatccactgtgaacaccgcaataaaggtggcaaacataaaggtcaggcccaccaccagggtggcgatcatctgctgttcagtagtggtaaagcccgccattttaaagatacgcggcgcatagtacatgatgatgttcatgccggtgaactgctgcatcgcctgcagcagcatgcccaggaacaccgcccggcgcacgttacgattgaccttaaacaacgcccaaccgccctgcttcagcttgaggctctcacggatctcgttaagctcgtcgcgcgccttttccgaggtatcgcgcagcatccgcagcacttcttccgcttcgatatggcgtcccttctccgccagccagcgcgggctgttcggcaaaaagacgaccagaatgatcaggatcaccgccggcagcgccagcacgcccagcatggcgcgccagttaccgctgtagctaaaggcggtatcggaaagaaacgccagcacaatgccaagggtgaccatcagctgatacatactgatcattttcccgcgcacgttctcgctggccatctcggagaggtacagcggcgcggtataagaggcaatcccgactgccacgcccagcaccacgcgggccaccagcagcacctccacgctggcggcaaaagcggatccgatagagccggccacaaagagtacggcccccgccatcaggctgtatttacgaccaaggcggaacgacagccagccgttaaacagcgcgcctatcgccgcccccaacatcatgctgctaaccacccactcctgaagctggctggataaggtgaaatggtcggttataaagggcaacgctccggatatcacgccgatatccaggccaaagagcaagcccgccaccgccgcggcgatggaaacaaaccagttcatccgccgggtatcacgttgcgtccgcggcgataatgtagagtcgttactgattgaagtcatttttttcctgccacacagagtaagacataagacgaaagtacgtgactggtggataaatgggtcaggcaggataagccaaagatatggactatattgctggcaggatgggttttgtgatggacatgaaactttcaaagtaacaaaaaatgcgtttccaatagttaataaccctgtttatacagagcggtaacattatacccgtgttccggagtatggacgatccgcacttttgcgtatggacaataattgctcagaaggccggagcgataccacagaccccggccatcgcggacggttagcgcgccagccagccgccgtccaccgccaccgtgtagccattgatgtaatcggaggctgaggaggcaaggaacacgactggccccatcagatcggccggtagcccccagcgcccggcgggaatgcgatcgaggatttcgctgctacgctgctcgtcggcgcgcagctgctgggtgttgttggtcgccatataccccggggcgatggcgttgacgttgatgttgtgtttggcccactcgttggccagcaggcgggtgacgcccatcaccgcgcttttggatgcggtatacgacggcacgcggatccccccctggaacgacagcatggaggcgatgttaatgatcttcccgccgctgccctgggcgataaagtgtttcgccgccgcctgggacataaaaaatacgctcttgatgttgaggttcatcacgtcgtcccagtctttttcgctgaacgccagcgcgtcctcgcggcgaatcaggccggcattgttgaccagaatatcaatatggccgaactccgccaccgcccgctccagaagctgaggaataccgtcgatctggcgcaggtcggcggtcaggctgagaaaacggcgtcccagcgcggttacccgctcgatagtctccaccggttcgacgatattgataccgacaatatcgcagcccgcttccgccagcccgagggccatcccctgacctaaaccggtatcgcatccgctcacgacggccacttttccctgcagggagaatgcatcaagaatcatattatgttccttagtcgttcagagcctgctgtttgcaggcaaggttctctcggcccggtccgcgccggcggcgcgactgagcgtggggcgaactctcgggcatagcccaccataatgaaaataaaacagagttccgttttgctgatgggtgccatcttagccccgcccccagccattttcaatattatttaaaacgatgtttcattttttatgatgacgattacaaaaaaagaaaaagcaaaggagcttcccggcacgcgccaggccggaaaaggttttgaaaagatgaagattcaaccgattgtctgcagaggtgccgaagcgaagccagcagaccgctgaaaacgcgggaattacgctgaactgcgtgagccatcacaaataatgaaacaatgttttgataaattaacacctgtcttttaaaacataccactcagcgacacgcctctggtccagcggcatcgcaggaaagaaaggagcactacatggctaaaggcatgcgggtcaaactgaattatcacgtcagccacgatccggataccggggcggaagtcacccgcttaacccccccggaggtcacctgtcatcgcaactacttctatcagaagtgcttttttaacgatggcagccatttactgttcgccggcgagtttgacggccactggaactactatctgctgaatatcgccagcgccgaggccgtccagctaaccgaaggcgccggggataacaccttcggcggcttcctctccccggacgataagtcgctttattacgtgaaaaatgaccgtatcctgctggaagtcaacctgaccaccctcgccgagcgcgaagtttatcgcgttagcgatgactgggtagggtatggcacctgggtggcaaacagcgattgcagcaaactggtgggcattgagattgccaaaagcgactggacgccactcaacgactggcagattttccatgatttcttccataaaggaccgcactgccgcctgctgcgcgtcgacctgcgcagcggtgagagccaggtgatccatgaggaaaaaatctggctgggacacccgatctatcgtcccttcgacgaccataccgtcgccttctgccatgaagggccgcacgatctggtggacgcccgcatgtggctggtcaacgaggatggcagccatgttcgcaaagtcaaagcgcatgctccaggcgaaagctgtactcatgaattttgggtgccggacggttcggcgctgatctacgtctcctatctgaaaggccagcaggggcggacgatctatcgctttgatcccgaaagcggcgtcaacgaggccctgatgacgatgccggcctgctcgcatctgatgagcaatttcgatggcacgctgctggtaggcgatggctcaggtacaccggtggatgtcaaggataccggcggctactccattgataacgatccctggctgtatgtctttaacgtggcggaaaagcgctacttccgcgtcgcgcgccatgatacctcgtgggcgacggtggccaacagccgccaggtaacgcacccgcacccctcatttaccccggacgatagcgccattctgttcagctccgataaagacggtaaaccggccatctatatcgcgaaattacccgcgcacccgtcaatgctgagcgcctgatccacgccacacttttttctgtaactggccttgccctccttcatggagggctttttttgtcccttctcttcccccataaaaaaaccccggctgacggcgccggggaaaacaaacgatgagggatgaatggtcggtcagaacgagtaagccaccccaacgcggaagcgggtctggcgatcgctgcggtcattgaccccgacgttgccaatttcgccatacggcgaccagttattatccagcttataggccaccttcacgttatattcctgcgagtagggtttattgtcgttgcggctgaccccttccgagctgcgggcatagacatagttcagctctgtacgccagtcgccgaggacaaatccggcccacgcgtcgccgcggttaactttgtcatcatctttgccggcgttgttcggatagcgggtgtattcatagcgatagcgagcggcgacatagaagccgttgtcgaaactgtactgcgcgtgcaggtgcggcttgtagatggagcggctgtcgttgctctcaatggtaaacccgggggtgaggaacaagttcgacgtcgctttccagcgccagctgatggtgtcttcatgaccattgcccaccacgtccgaatagggttgcgaaccgttgtcgccgcctgagcgccatttggcctcgacggtaaagcctaagccgttggcaaagcggtgagaaacggagacgcggtcagcattacttttatcactctttccgccatcaataaattcatgacgtaaatctatcgttaccgcggttgctgcaaaagacataccgcagagggcggcgagaaccagagagcgttttaacatagggtacccttacaataaataaaatgacatttcgtttttatgaaacatcattttattttttaggcaccatagttttagtgaccaggatcgtagttatttgtttcaaaaaaggtggcacaacaagacgtgacgaagctcaataatttcgccggggagagtgaaagagggagggaaaaataagggttcggcaaagcacggcgcataaaaaaggcctcccgcaggaggccatggaaatcgaggtatagcgctatgcgcgttctaccgccagcgccacgccctgaccgccgccaatgcacagcgtcgccagacctttgcgggcatcgcgcttgatcatttcatgcaccagcgacaccagaatccggcagccggaggcgccgatggggtggccgagggcgatcgcgccgccgttgacgttgacccggcgctcatcccactccagtacccggccaaccgagatcgcctgagcggcaaaggcctcattggcttcgatcagatcgacgtcgtccagccgccagccggcccgctccagacagcgacgggtggcatgcaccggggcaatgcccatcagcgccggatcgacgccgacgctggcgaaggcgcggatccgcgcaaggatcggcagccccagctccagcgctttagcctcgctcatcatcattaccgccgccgcgccgtcattgatgcttgaggcgttgccggcggttaccgatccaaggcgatcgaaggtgggctgcaggctggccagcccttccgcgctggcatccacccgcggttgttcatcggtatccacggtgcgcgccgcgccgttatgctcggtgacaaccgggacgatctcatcgcgaaagcgaccggaatcaatcgccttgcgcgccttatgctgtgagctgagcgcccaggcgtcctgcagctcgcgactgatgccaaattcccgggccaggttttccgccgtgacgcccatatgataatcgttgaaagcatcccacagcccatcatgcaccagactgtcaatcagctggctgttgcccagctgggcgccggtgcggctgtcggtaagcacatgcggagcgcggctcatattctcctggccgccagcgatcaccacgtccgcttccccgcactggatcgcctgggtagcgaggtgcagagccttcaggccggaaccgcagacatcgttaatggtgatagccgatacggtgttaggcagcccaccgcgaatagcggactgacgcgccggattttgtccggtccccgcggtcagcacctggccgaggatcacctcatccacgctgtgcggatcgattcccgtcttctccaccagcgccttcaccaccacgctccccagctcgacggctgaatggcgcgataatgcgccctgaaagcagccaatcggcgttcgcagcgcgccgacgatcacgacatccttcatcctctacccctgcccatgcatttgcgcaaagaaacagcgatatactagataattgttatcaaaaaactttgtaattgtttaaaaaaagtgaagccaatcacaaagaaatagctatgcgttaacgttcacgccgctgcagatgctgacgcagccagctgccggccgctcccggcggcgctttcttattccacagcagatcgactgaaatcgcccgcggccagccggggatatcgagcgccaccagcccgccctgcggcgcaaactccgccaccagcgcgctgggcagaatgcaccagccgaacccctgtgccgccatgctgagcagcagcaggtagtttggcgccgaccagacctggcctgcggcaggttcggtgacgctggccagaaaggtgctcaaacgcagctcgcgccagctgcgcagctcatcccaggcgaccttaccctgcgccgccagcggatggccaggggctacataaatgcccatcgccgtctgcagcggcaggcgggtgctgccgatatcggtggggtagcgctctctcgcctcaatcagccccacctgggcgcgggatttttgcaggagatcgatcacatcctcgtcttcgccaatcaaacactcaaactcggtatgaggaaagcggcggtcaaactgcaccagcagatcttccagcacgtccgggtgcagagtatcggagagcacgaaggtcagccgcggctccgtctcgccggacagcgacacagccagttcgtccagccgctcgctggcggcgagaatcgctttgacatagctcagcacctgctccccctgcggggtcagcgtcggttgccgcgttgccctgtcaaagagggttacgccgagatcggcctccagattggcgatggcggtactgatcgtcgactgacttttccgcaggcggcgggcggcggcggagaacgatccgctgtcgaccgcctcgacaaaggcggttaaggcttccggtgaataacgcatgatgtatctacaatatcgatgggtcctatcttttgtttatcatatttttccataaactgccgggtaatttcctgttcaggctaaaactggaggtagctcgccatgcaacagaccccacatcagcgcaagacgctcaccgaacgcgttatccacgccatcaccttcgaaggactggcgacgctgatcctcgcccctaccgccgcctggctgatgcagcgctcggtagtggagatgggcggactgagcattctgctcgccaccctggcgatggtatggaacattatctataacgcggcgttcgatcgcctgtggccggtctcccgcttcccccgccagctgaaagtacgcgccctgcacgcgctcggtttcgaaaccggattcgtcatcattggcgtcaccatggtggcgatcgtgctgggcgtctcgctgctgcaggcgtttatgctggagatcggttttatgcttttcttcctgccctacaccatggcctttaactggatatgggacaccctgcgcgagcgcgttattcgtcaccgccgcccgcgccagacggcgcgcggttaatcccggcgcggatcttcgacgatccgccgcgactttatcaccaaaaactatcgcaacagacgaaccataaatatggtaaattgcactccttttttttggtttgacggttgataaagtcgcataatgtctaaaatttggtctaaagaagaaactctatggagttttgccttatatggcactgcagtaggcgctgggacgctatttctaccgatccagctgggttcggctggcgccattgtgctgttcatcaccgcgctggtcgcctggccgctcacttactggccccacaaagcgctgagccagtttattctctcggccaatatcgcgccgggaaccgggatcaccggcgcagttaatcactactatggtaagaaaattggcaacctgatcaccggcctctatttccttgccttctttgtggtggtgctcatctacgccgtggccatcaccaactcgctggccgaacaggtggcgcatcgcacgccgatgaccccagggctgcgtgcgctgctgagtttgggggtcgtgctggtcctcaacctgatctttctcatgggacggcaggtcaccatcaaggtgatgggctttctggtcttcccgcttatcgcctgtttcctgtttctctccctctatttaatccgcgactggcatccggagcatctcaccagccagatgcagttcagcccgcagacgctccaccaggtctggatctctattcccgtgatggttttcgcttttagccatacgccgatcatctcgacttttgctatcgatcagcaggagaaacacggcgacctggccatgggtaaatgcaaaaaaatcatgaaggtggcctacaccatcatctgcgccagcgtgctgttttttgtcttcagttgtctgctggcgatcccggcaacctatatagagaccgcccgcgatcagggggtgactatcctctccgccctgtcgatggtgccaggcgcgccgggatggctggcggtgaccggcatcatcgtcgccgtcgtcgctatgtcgaagtcgtttctcggaacctacttcggagtgattgagggcgccagcgaaatcgtcaaaagctcgctgggcctgctgggcgtgcgtaagagccgcgctttcaaccgcgcgatgtcgatcctgctggtctccgccttcacttttgcggtgtgctttatcaacccgaatgcgatctcaatgatctacgctatcagcggaccgcttatcgccatgatcctgtttatcatgcccacgctgtcgacatggctcattccggcgctgaagccgtaccgctcggtgggtaacgccattacgctggtggttggcctgctctgcgtgtcggtgatgttcttcggctaatcccctctggcgacagcggctgcctgagctgctgtcgcacattctgacaatattctcccccttgccttccttgtgagcggattacacttacggcttagccaccgtgaggagagttcttatgtccagtgtcaccttatccggtcgcggcacgctcggcgatcgccaggtctatcgcttaggttacggcgcgatgcagctggccggccccggtgttttcggcccgcccaaagatcctgaagaagcggtgcgcgtactacaggccgccgtcgaggccgggataaaccatatcgatacctctgatttctacggtccacatgtcaccaatcagttgatccgcaaagcgctccacccctaccctgacgatctgtgcattgtcaccaaggtcagcgcccgccgtgacgagaaaggcaactggctaccggccatgtcgcccgccgaactgacccaggccgttgaagacaatttgcgtcacctggggctcgaggtactggaagtggttaatctgcgcagtatgctgagcccgcacggcccggtggagggttcgctggaggcgccactcgccaccctgctggaactgaaagagcgaggattaatccgccatatcggcctcagcaacgtgacggcaaagcaggtcgcggatgcgcagaaaatgacgcccatcgtctgcgtgcaaaacctttataacgttgcccatcgcgccgacgacgcgctggtggatgcgctggccgcccagcacatcgcctgggtgccctttttcccgctgggcggttttacgccgttgcaggcgcaggagttgaacgaggtcgcggcttcgcttgaggcgacgccgatgcaggtcgccctcgcctggctgctccagcgagcgccaaatattctgctgatccccggcacctcctcccgcacgcacctcgcggaaaatattgccgctgctgagctggtcctgcccgcggaagcgctgcgcaccctcgataatatcgccaccgccgcgcgccgctgacctgccagacaaaatggagggaaccctatccctcctcaatatttgcctggaaaaacctcaccgctactggcactatagatcctacaaatggggcgtgatcgacgatcgttctctcattatccccgttaattaaacttaagtttttatccttcgaccggtctccagcttggaggccgttgtcgtttttgtcatgaccaaaattcgaaactcttgattacaggaaatacaatatcaaattccaagtttatacatatcaatctggctgcaaagatagtcaataacatcaaacgctcataaaaacatctgattaacccaatcagaatgttgctattgctataagaaaaatcaaacgcctcacgacaactatttacaagggatgcatatgacagagggaacgataaagaccagtaagtatgaaattattgctattttcagagaggagttgcgcaaacgtactgaaattgaaatattttttaacaacaccagtatcataacccaactgacgcgcgtggactttgccgagtttcatattcagacccatcgcaaaatcccgtccgggcataaaattcgctttctcctgcatagcgattcagggaaaatagagtttaatgcggccctgacaaaacatgacaatagcggtgtcgataaaggtatccgctacgctttttcattgcctgaatgcctgcaggtagtgcagcgtcgccgcgatccccgctttcgtttacgccatgagcatgacttttattgccgcggccgccataaaaacggcgaaaactatcttttcgatatcaaagacatttcagatggcggttgcgcattgatgaccaaaacgccgaatcttaaatttctcagccacaacgccttactgaaaaacgccgtacttatgcttgcagaatatggcgagatcaccatcgacctggtggtcaaaaatgtcattgttatcaccctggataacgctaatgaagagagtgagagctactatcagatatcctgccagtttaagttccgccatctcgatgaccagcgcagaatagagaagatactgctggacctgatcttagaagccaagcgcaaaaagagaatctgacaaccttggacagtatattgctgtacaccaatgacaatctcattggtcactcaatctatcactaccttattgatagccatgaaaatgccacccgtctgagttatgccgatgtcatccatgagaaacatctgccactggcccagacgattattttcaatttaattaataaggatatttctgccatcaggatcgtcgatctgctgaatgcgctccgcctttccctgctgcgctgccagcagccggtgctaatggtgaaaagcgacattgtcgggctgtgcagagagttgataaactttgacaacgctatgattattagtgagaaatctccgctaactcttttttcatctatcgtccagcgcgccaaaggcgtcagcgaactgccgccgcgaggattgcgcaaacagctttcaccacgggagtgtcagatcctcgaactgctcattgccaacaataataataagcgtattgccgccctgctcggcattgctcataaaacggttcatagccaccgcatccatatcatgcaaaaactgggtattgataattcccgcactatgaatcagcgtattgccgctctccatcaatgctaaatgttctcccggtaaatcagtagcggataaagcgtacttattcgctgttgatttacatttcccgccattcccattaatcatcaggtagcctataattaatgtatcctctgcctattgtctgactaacctcgtgaagagggataatgaacactaaaatattcgaagacaacattttatctcgtaatgatatcgctgtacgctacgtctttcagaaaatgttttccccacaaggtactctggtcgcggtggaatgcttaagccgctttgataatctttctatttcccccgaagattttttccgccatgctaccgccgccgttcgtgaacgtatttttctcgaacaactggcactgattgaaaagcataaagcctggtttttacgtaaccatatttccgcaacaattaacgttgatgaccatatcctgaacctgttgcgccagaaggatataaaagccaaaatcgccgccctgacctgcgtccatttcgaggtaaccgaaaacgccgagaatctgctgcataattctcttgccgcctggcagagcccacaggatacctcactgtggctcgacgacttcggctccggctacgcgggaattaacgctattcgcggttatcactttgactatgtgaaaattgataaggattttttctggcacctgatgcgcaaagagtccggccgccagctgatggatgcgctggtgacctttttatcgcgcaaccatcataatgtgattattgaaggtgtcgaaagcgaagcccataaagaatggctgcagggaatggagtggtttgctatccagggacattactggcgggaagtcagtattgaacaactggtcgccgatgatattgccatgtaaaaaaagccgggaattcccggctttttaacgtcacttaattataaactaattcccacgttgcccagctggtaatcggcccgctggtggcgcttttcggcgttggcgaaacatagccaacgtaataggtgaacaggccgccgctgaccgcgctttcctgcaaacgcacctgattttgctgcgggtccgccgggacaattttattactcttatccagagtattattatcgttagtcgatagggccagataaatattctgcgctccatccggcaaggtattggccagatacccggcattttcgttaccgaccgccgtcagtaaaaaaccatcgacccagcgcacgctgacccgacgcacctcatcctgcgaggctgccccaccatcatggcgcagctggcagtttgacagtgccagggtaaacggctgcggtttcataaacgccccggccccgcgatcgtggacttccgccaggctgaccggcgccagccagacattaccgctgccggcatgctggccgccgtttagcgcgacgctacaggaaatatccgtcacccgcccggcaaaatcgacccgtccgcgatcgtaattggtctcaaaaccccacgccgagggggcggcgaggctgccgcaaaatagcagccacgcgatagtgtttttcggcaatcccttcattccccctcccgtattaatcgtacgtcaggttaaagatcatatgcgactccacctcgccggtgctggtcgtcgggccatactgataaaaacgcgcgtgcagcggtatggtgatgtagcgggtctcctgattattcaagcggccgacggtgtatttcttattaaactgcagcggggagccatccttcagcacctggatgccaatgcctttcgccatcccgctgccggctttttcattcagcaaggcgcccatggtagcggtagtgctggtggccagggtaccggagaacgaggtactaatgttggcatatcccgtttcactcaggccgccgctgcactgcaggtcgatattaaaatccttcccgccggcggtggtgccgacccctttcaggtcggtgcgccggatggaacccacatcgacattcatatttttcccgctcagcaccgaacaggagggcgagaccacggtgatggcgttggcgctcagataggtttcgaggatcgggttaccgccgctctcccagtcgtaggaggtgtacttacccgccgccagggtgccgctgccggtggttgccgcggttttgataatctgcagcgtaaagcgcgacccttcgagggaatagttggtggtgttatatacccgggacgaaaagacgtcgggatagacgatatttaccgttgcgccgccgcggctgaaacgcatgccgattcccggcacgttggtggagtagattttatttccaaggtccgtggcccctggcgacacgatcttcgccgcaaagcggttggtgccggaagtacagcgatagcttgccccgccgggagcgctcatcgtccaatcgcgggtaaggatcaccgagcccaccggcagatccgggggcaccaccaccctgcccaccaccatgtccagcatcaccgttggcgatgagagacgcgtacaggaggcccaggacgaggtggttcccagcgccattaagacgataaaaagcgttagtaatttcctcagcgacatacgctatcctttgttgtttgctgtcccagatccaccgaacactgcccgccgctccacttcacaatcgcgcgtttggcgttcgcatcgctgataaacatcatgctgccctggccgacaacgccgatctccttgccgtcgggggagaaaatacttgccgcaaacggcaacggctcgtggttcgcctggcgcgcctgcagggtgaggttgttctgcaccttagtgccgaacgcgaccttaaccacgctgccttcccacggcacaacctgcgccacggtgcgatcgaaggccacgtcgtcatggctgcctttcgggtcgatttccacggcgttaatccggtacgggcgcagatacggcaggatggcgtaaccattgctgtccacacgggtgcccggcgatcccggaagcatcgccccggccgcgtctttggcttcaatcagggccatcgtcgagccgctttccggtgagaacaccacgccgccgctgtgggcgatcatcgtcccgctggcgccaatgccgctctgacgatagccttcgccctggctgtagctgccgttgagggtggtccatggcgtacggtagctgccgttgagcgccacatcatgctgaccgccggtggcggtggtggtcgacacgccgtagttaaggttgttttcactgtccagcgaaccgttgataccaatctgcgagctggcaaagcgcgagttattgaacgaggtgttcgacgtcaggttggcggtgcggttatcgccaaaccacagcgggtagctgaagttgagtgaaatacgatcgtcgcgacgatgaccggagctgtctggcgtatagacgcgctgcgcgctcgccgaccaggagagacgaccaaatgaattgttgtagctgacctgatactgcttctcggtcccggagcggttccagtaatcggagatacggccgctgagataaaacccgccccagccgtccggcaggttctggttcaccgtgaaggtcatgccgtttttttgccgccacagggtgtagttgctgcgactatttttttcctgatcgacggcgtacagcgcgtcgttgaggttgtaataacctttcgtcgagtagcgatacgccgccaacacgatgctggtctgggtatcggtaaacatgcggttaaaggtcgcgcgatagctctgacccgagtcatcatgggcatcgctcttcaaccgcgaatgagtgacgtcaaaagagagcgcgccgatgccggtgttcatcccggtccccaccaggaaggcctgatagtcgtcaaaaccggtgaccccggtgtagccggtcaacagattgttgatcccgtgctgccaggtcgcctgatagagcatcggcttgttgcgcagcgcgctgtcgtccactttaccggcggagagcgcgtagcgggtcattcccggacgcagcagctgggcgacggaagcgtaaggcacgctaaacacttctaccgagccatccgcttctttcaccgagacctcaagatcgctgccatagccggaaggatagacatcctgcagggtaaacggtccgggcggaacggtggtctgatagataatattgctgccctggcgcacggtgacgagggcgttgctctgcgccacgccgcgaatttccggagcatacgagcgcatgccgtccgggaacatattgtcatcggtggaaagattaaccccgcgcagaccgatggtgtcgaaaaattcaccattggtgaaaatctgcccgccgctgacgatggagttgagctgtgggatagggcgctggagataggtctggttgctgttccagtgcgctttaccctgctgctgctgccagttcaggttgccgatgtgcttcagcagccagccgtcccacgacagaccggcgttgacgcccagataggcgctgctgttatccgacccgcctaccgaagaggtatggctgttccaggcgttcgccatccagccaagattgagcgcggtaatacctttgtcccagaactccgggctgacatagtttttcaggcgttgatcttcatagatctgcggtaccgaaatgttcaaccgcagggaggactggaccaggttgtctttgacgttttcttcgttgcgccaggatttgaggctaccgcagtagccctcctgctcgctcagctgcggattgagcttttccgccgcgatgccatattgggccagcatcgctttggtgtagcagacgcccagccgaccatctttatcgcgcgcgatgcgtaaatcgtagcgccctttccactcgtcgttggtgtagacgtcaagggagtaagtgccttcggtaatcgcgctggtcgaaaagcgcgacagatcgaccttttcgcgactgccgacaataaagccgtcgttaaactgatataccgttcccgggttttcctgtccgctggaaaatggcggaaagcagcacagcgcgatggcgatcgcggtgcttaatcttcccgggcagaatgacctctgcttcattagcttttcccttatttaacggccactttcactgcgacatcggcgccatagtcattaatgttgttaacggtcagggtttcgccgcggttgacggcggaggagagcgccaccgtctggctggactgcggcgccagcatcacggttttgctgttcagggctttaccgccgtcgcgggaaatacggctgacggtaatgtagaacggcgtcgggttgttgatggcgagactactgccgctggcggtcagggtcagcttctcggccgccgcatcgcggttgcccaggccggcaggacgataaataaatttaaagcgcgaacggatcgccagctgcagcacgttctggccttcatttttctgattggccaccaccggcggaatttccagcagattcagccaccacagcgtctctttatctttcgccagaccggcgctgctgccgagcttaatacgcagcgtctggccgctcttggcgtcaacgcgcgaaatcggcggggtgataataaacggggtggtaatggtatccggtgtggcatcggcatcgccgttatccagccaggcctgcgccagcgccggacggtcggcgttatttgaaagctgtaccgttatttctttttcatttcctggataaataaagcgggtaccgttaacaataatattgttggcatgggccgcaaaactaaaaatgaaacagaaaaaaagggcaatacgcttcatgctgacctcagaataaaaatacaagcggcggacattgccgctttattattgttattaactgccccatcgcggggcagttttattttctgacggaattactggtaagtaatttcgtaagtcgcgtagctgttaaccacaccggtggttaccgtggtcggcgcgctggtggcgtagcctacgtagtaggtgaaacgcgcgccatcagctacagcggaagcgtcgcctttcgctttcggctgagtgctgtcacccgggatgattttgttggtcagcgcggtagcgttgtcagtagacagcaccagctggatgttctgagcaccggaagcttcggtgttcgccaggtagccctgttgtttgctggttgcgccagccagcaggttaccgccggtccagttcacgcccagtttgcttacgtcatcctgtttagtgccatcagcagcctggcagttagagacgtcaatggtgaaagatttcggtttcaggtaagtatccgctgctgccgctttaacttcagtcagggttaccggagacaggtaaacgttcgcatcgctgccctggccgttaacggaaacagtacaggatacatcggtaactttaccgaagaaattaacctggccgccgccaacagtggtatcagctgcatgggcagcagtcatgccaaaaaacgcggttgccattgctgcagagagaagaacctttttcattgccatttccttgtcagagtgaattacgaatcaatgagcacactgtgaattcgcatagaaccagaaacatcaggcgatgctgatttatgccactgctaatagaatcttcgactgaccgggagccgcaatatttaaggcgtcaggtaacgaacctaaaaatataagttcgctggtgctatcggcgtcaaagaatgctatttattcgccgacaaatatacatttgttcacgtttcattaagttatataacagataaccatcgactattaataaacagtcattgatagatgaaaacgcgagggtggttgtttacagcgcagcaagcctaacgccagagcgagagaaagtgaccgcaacagaatgcagaaaaagccctcggaaggccatcgcgataagtctgaatctgcctttgcggtggtgaaaacagcaccaaaccattcacacaacgaatgatgaaagcatgaatgaggcgcattcctctccctgaacaagggcagcccatgtgatccccccctttcagaaacaaatcattaatccattgtttttaaactaaaaaatagataaacgatcatgtttacgccatcaaaccgccataaaaatgtgatctaaatcgcactttttgccacgcgcattatagttagcaggcttattataagtccatcgaaagcaaacatgctttccaccataaaagttaaaaggacaaacaccatgaaaaacgtaaaattactcgccgctgccggtatgctctccctggtctctttcgctagcttcgctcatccggtgagcgtgacagcagacaccctggacagcgcagaagcgaaaatcgcaaccattgcgaaagaacaaggcgcttcctatcacattaccgaagcgtacaccggcaaccaggtccatatgaccgccgagctgtctaaataagcgaatggttgcagagggagctgccggacaggccgcctgcgggtggctggtctggctcccgccgcccaccccgcacgcagcaatgtcgagccccgttacggggcttttttcgtttttgctcccgccgcctgacgcgccagcgcgcgctggatagacatcacgctcgccagcaccacgatcaatcccatcagcgccatcccctggatcttttgtccgaggaatatccatcccagtaccacggcggtcaccgggctcagcagactcatcgccgacacggccaccggtgagaggcggccaatcccccgaaaccacaggccataggccagcatggcgcccgccaggcacagccacagatagccggccgcctgcagcactgttacctgatgcaaaggagggtcaacgatcagcgccaccggggccagcaccaccccaccgatcgtcagctgccagccggtcagcgcgacgatcggcagggagagcgcccagcgccgggagagccaggtgcccagcgccatactgatcgccccgagaaacgccgcgccgatgcccagcgggtcgaggacggtgtgcggcgacagcagcagcatggccataccgagtatgccggcgatggcggagaacaccgccagccagggcgagcgctgccggtcgacacaccaggcgaggagcatcaccagcagcggctggatcgcgccgatcaccgccgccagcccgccgggtaagcgataggcggcgataaacaacagcgcctgaaacgcgccgatatttaagatgccggtaacgatcagctttgcccattcgccgcgttgcggaaaacgacggctccagatcagcagggcgatacctgccggcagcaccctcagcagcgcagcaataaatgggcggtcagggggaagaaactgggaggtgacgatgtaggtcgtcccccagatagcgggcgccagcgcggtgagcagcaggtcgagaatcagattacgtgagagaaaagccatgattttatcttcacttcaaggtaaattagtgagtgaagtatgtaccgccaagtatcttgatatcaagacaagtgagcactaatggacaaatcaccgccgatcgacgccgtggatcgcatcctagcccagtggcagcgggagcggccagacctcgactgcagccccatggggccgataggtcgcctgaaacgatgcgctatgctgctggagccgcaggtggaagtggcctttacgcgccacgatctggtgcgctgggagtttgacatgctggcgacgctgcggcgcgccggagcgcctttcgtactttcgcccacccagctcttctccacgctgatgattacctccggcaccatgacccatcgtctgaaggcgctggagaaacgcgggtttattacccgcctgcccaatccggaggatgcccgcagtatgctggtcgccctgacttccgccggacgcgaacggatcgatgccgcagtggaaacccacgtcgacaacgaacggcaactgctggcaggactcagtgacggtgaacgccagcagttggatcaggcgctgcgggtgttgatgcgactgctggaaacgggctaacagccagcggcgataaagtcgccgttggcgctgatcggcaccacgctgaaaaacaatcccacggcaaagaggatcagcgccagaccgccgaggatcttcatcagcggaaccagccagggccgcgggcggtgattcgtgaccaatcgtttgaccgtccgatggcgcgcatagtgaaccagtagcgacagaccgaggatcgagagcgcggtgcccagcgccatgctcatcaccgcggcgatgccccagctaacaatccccaacgcattggcgaataataaaatcatgatcgccccgctacagggccgaacgccgatagccagcaccacgccaaggcgcgtcttccagtcagcgccctgcagatcctgccccacgccgtgatggccgcagccgcacgaggcgtcatgctgatgcgctggcgtcagacggcgaatcacctgttttgtcggccacaggctttgcagagcgcgaaagataacataagccccaaagacgccgatggtcagggcgctgatcttctcgacgtaccagcggctggcgctaagatcgccggcggccagattcagccccaccgcaagaataaagacaaagagtatcgcagtgacgccctgcaacaggctgccgagaaagggcaccacccgcgccgccgtcaggctctccttattggtgctcaggtaggtcgtcacgataaatttaccgtgtcccggtccgacggcgtgcagcacgccatagagaaaggcccccaccagcagccagataccgccgctgtactgatggttattcagcaacagaaggtacatcaccagatagcgatgcagggtaatttgggtggcgagacaccactggagaaagtcaccccagtggctgtgcaaggtgatagcggcggccagcagtagaaggccgccgcacccggccgccagcaggcgccagtcgcggagcgcaatcggagtcgtcatcgttataccattgtagtaaacgtaaaccgcctgacagcaactttacgacaggcgagcgaaggtgtcagcgctgaagggtgaggaatttgtcgaagctgttcacgggattgttcgtagtcaccaggctccgcattatctaccgatcgctatcttcccgacaccgtattagcgcagaatgcctcaatatcttgagcataccacagctatatctttttatgcgttattggttaccaataccttttaacaggaataattactcaaaaaatcacagataaaaataaataagttatttcttggcgagcattttttgtcagttattatgctgcgcttccggcaagaatattctttaactgctatttattgtactcttcagcaggatcaattccatgaaaagaggcttacttaccctggttactgctgccatcgctttccgtacaggccacctggcgcagcgacaagcgccaggaggcacgtgacgaaaagtggtgaaccggcaggcttcggcgtatcctggatgtgagtccttcccgcgccgaagcgagtattccaacccgccgccagaccgtgtcgcaatacttacctgtcctctactacctcccattgatatcttcctgtatacgttgaccgtgacgagttttcatctcattcaaccgcatgtaccagattaagcttacccgttgaaatacggcgtaatgtgctctattacagacaatgctattatcaccaggctttttgcagtatggtttaatcactgttgtagttttgcagtgaatgctatccagacgacttaaggttgtattttgtctgagaaatttctcatgccattcccgaaggttgtcggcgagggaggctggtttactggggtgacattgcccagtagacaggcaatcaatcatgacggcattgatagccgccttgccgtggccggaagcccaagccttcatcatcatgcgggtatcatcaagaggatcagggatgtacaggacgtggaaacccccaggaaagattcatcagttcagccagctcaccctttctttacccttcagttcgcggcctcttatcgttagcaatggagctagcccatgataccgctcgcgctcgtagcaaattaaaacgttatcaccacgctgtttcaaaataaaaaggcagtcaaatttaacaatgacctgacgcaggctcggaaaaccaaaaatatgcctgcaataaaagggaaaaccatgacgaataacgccgacttaaaaaaaaggaacttcctgactcagaatgaaattgagtctttacttaaagcggccgataccggtccttatgctgcacgtaattattgcctgacgttactgtgcttcatccatggtctgcgcgccagcgagatctgtcgtctacgaatatcggatatcgaccttgctgcccgatgtgtttacatccatcggcttaaaaaagggttttcgactacccacccgttgctggataaagagatctacgccctaaagcgctggctggccattcgcagcagctggccgcaggccgccagcgaatggctgtttctctcccgcaaaggtaatcccctttcccgccaacagttttatcagattatcgcgtcctcagggggactggcagggctgccactggagatccacccgcacatgctgcggcactcctgtggctttgcgttggcgaatatggggatcgatacccgcttgatacaggattatctcgggcatcgcaatatccgccacaccgtctggtataccgccagcaatgcgggacgcttctatggcatctgggacaatccccgtgacaaacagcgatcgtcgctgatccaatagccttgacgccacggatggcgttgtatcgcgatcggtcgacaaattaaaatattcatgattattaaccctgcgttaattaggattactgttcccacaagttcttatttaatccttattactgagagttaatataaccctgcgtttactcaggaataagactgggtatttattggtgggaaaaaatttccgcggctgtgtgtttaatagcggctggtaatgaaaaatatcctttcattttatatacctggcggcaacccgcgcagatactattgagccgatgattaaaatctttaaaattaagaattatcacccgacgatatttttagtgtctggcaatgtaatatgttatcaattcgtgattaatcatcttcaccctgtaccgttttagcattacagaacctttctcgtcatggcgtatggtttcgctgtgacggtcattcatacctattttcaggagcaactattgtgaaccgacgtcgttttctaaccgccaaagaagttcaggccatgatgcaggctgctcgtcagggccctaccggcgaacgggactactgcctcattctgctggcctttcgccatggtatgcgcattagcgaactgctggatctgcattatcacgatctggatctccatgaagggcgggttaatgtgcggcgattaaagaatggtttttcgacgattcatccactgcgttttgatgagcgcgaggcgattgagcgctggagcctggtccgtgccggctggaaagcggcggacaaaacggacgcactgtttatctcccgccgcggcaccgcgctctcccgccagcaggcgtatcgtattattcgctctgccggggaaaatgcgggtaccgtcacgcacactcacccccatatgctgcgtcacgcctgcggctatgaactggctgaaagagggacagatacgcgtttgatacaggattatctaggacatcgtaatattcgtcacacagtacgttacaccgccagtaatgcggcacgtttcgctggcatctgggaaagaaataatcttttagaggaaaaagaccagaagacgaaaaatgaaataacagattgattttaaagaattaaaaaaataacgaacaggtcaattggggccaaactgtttatatcataaaaatgttttgacatattttgcaactcactgcgccatatttccgcaaaaaaaatcatatctcattgattattatctatttttaaacctgcaattactcacttttctctaaccatatctctgctgcaccggcgatccgtcgccaacgccatcgctattcctttcgcaccccctcccaccacaccagattatattaccataaaaaccaaatttggcagcatttaaaaccacagaataccaggttgacacaaaatacagatcatttatcccaacgagtcaaaatggccccaattgtctcatcggttgggcgaaaactgtgcagagccggcagccggaccactcggctgaaatctgaaatgcctggaaggcacaacggctgccaatccggttcgttatttcgacatcgttcaaaggaaaacagtatgaaaatcaaaacactggcaatgattgttgtgtcagccctgtcactgagctccacggcagctctggccgataccaccacggtcaacggcgggaccgtgcattttaaaggagaagtcgttaatgcggcctgtgcggtggatgccggctctatcgatcaaaccgttcagttaggccaggtgcgttccgcgaaactggccacggcggggagcaccagttcggccgtcggtttcaacatccagctggatgattgcgacactacggtagccaccaaagcgtccgtcgccttcgccggtacggccatcgacagcagcaataccaccgttctggccctgcaaaactctgccgctggcagcgcaaccaacgtcggcgtgcagatcctcgacaataccggtacgccactggcactggacggcgccaccttcagtgctgcgaccacgctgaatgacggccccaacatcatcccgttccaggcacgttactacgcgaccggcgcagcgacggctggtatagcgaacgcggatgcctcgttcaaagtgcagtacgagtaagacccgagtcaggcagggaagctattcgggccaggagggcccgctctctattttcaaccggagtgaaacgatgcagggaatgaaatctggtctgctgctgctactgcctccgctggcgctggccggtaatcattggaacgtcacgctgccggggggcagcatgcgttttcagggcctgataatggcgagctcctgccacgtcgaagccggcgatcggcagatgacggtcaatctggggcagatcagcagtaatcgatttcatgctgtcggcgaagacagcaacccaatccctttcgcgattcatttacaggattgcagtacggcggtcagccagcatgtgggtgtgacctttcacggcgtggctgatggaaaaaaccccgacgtgctgtcggtgggtgaaggtccggggatcgccagtgggatcggtattgcgctattcgacagccagggccagcagctcccgctcaatcgtccaacggatcgctggatatcactctaccgcggacggacgacgctaaatttcgtcgccaaatatcgggcgaccggacgccaggtcaccggcggtgcagccaatgcccaggcctggttctcattgacctatcagtaattaatccgcagacaaacaggacaacacggtgagcagacaaggagataatgtgagaaaaacggcaacgatggcgcatggcttactggcaggatgtgtgcttttcgccgccagtatctttagcgccagcgcgcaggcgggcgttgcgcttggcgcgacccgggttatctacccggcgggacagaagcaggtccagctcgcggtgaccaataatgatgacaacagtacctggcttattcagtcatgggtggaaaatgccgatggtcagcgagacggccggtttgtcatcactcctccgctgtttgccatgcagggtaaaaaagagaacaccctgcgcattatcgacgccaccaataaccagctgccgcaggatcgggaaagtctgttctggatgaacgtgaaggcgatcccttcgatggataaatcaaagctcagcgacaataccctgcagctggcgattatcagccgcatcaagctctactaccgtccgggaaaactggccctgcctccggatcaagcggcggaaaagctgacctttagccgtagcggatcgtcgctgacgctgacgaaccccaccccctattacctgacggtgaccgaactgaacgccgggacacgcattctggagaacgccctcgtaccgccgatgggcaaaaccagcgtcaagctacccgcggatgccgggaacaccatcacctatcgcacgattaatgattacggcgcgctgacgccgaaaatgaatggcgtgctgcgctaacccagaagcgccccgccgcgcgggacacgctgcgcatgaccagaagcaatgacagccgggcaacgtcggaccggagggataatgtcacatcggaaatatggactggatcatttaggttgccgaactgcccggcgcctggtatctccggcgctggcgctgtggctctgctcacagccgtttgccgcgcgggcggacctctattttaacccccgctttttagctgacgatccggcggcggtggctgacctgtcgggatttgaaaaaggccaggaggttccgccaggcacctatcgcgtcgatatttatctcaacaatggttttatgaccaccagggacgtcaccttccaggccgatgcccagggtcacggtctgtccccctgcctgacacgcggccagctggcgagcatgggtgtggataccggtcgggtgccgggcatggcgacgctggacagcacggcctgcgtgccgctgaccacgcttatcagcgaagctaccacgcgcttcgacgtcggacagcagcgcctgtacctcaccgtcccccaggcatttatgggtaaccatgcgcgcggctatattccgccggagctgtgggataacggtatcaccgccgggctgataaactataacttcacgggcaataacgcccataacaccacaggtggcagcagccgttacgcctatctgaatctacagagcggcctgaacattggcgcctggcgtctgcgcgataacagcacctggagctacagcagcggcggtagcacctcatccaacgagaatcgctggcagcacgttaacagctggcttgagcgggacatcacgcctctgcgttcgcgactcaccctaggggacagctacaccaacggcgatgtcttcgacgggatcaacttccgcggcgcccagctggcctccgacgacaatatgctaccggacagccagaaaggctttgcgccggtgatccacgggatcgcccgcggcacggcgcaggtgtcaatcaggcaaaacggctacgaaatctaccagagcacagtgccgccgggaccatttaccatcgacgatctctacgccgcgggcaatggcggcgatctgcaggtcacgatcaaagaagcggatggctcccgccaggtcttcagcgtgccctggtcaacggtgccggttctccagcgtgaaggccatacccgcttcgccctcaccgccggggagtaccgcagcggcaacagtcagcaggaaacgcccgattttttccagggcacggtcatgcatggcctgccggcaggctggacgctctacggcggcacccagctggcagaccgctatcgcgcctttaaccttggggtggggaaaaacatgggctatttcggcgccctgtcgctggatatcactcaggccaacgccaccctggctgacgacagcgaacatcaggggcagtcggtgcgttttctctataacaaatccctggatgagaccggcaccaacctgcagctggtgggctaccgctactctacccgcggctattataactttgccgataccacttaccgccggatgagcggctacagtgtggaaacccaggacggcgttatccaggtaaaaccgaaatttaccgactactacaatctggcttacagcaagcgcggcaaggtgcagctgagcgtgactcagcagttggggcgcaccgccaccctctatctcagcggtagccaccagacctactggggcaccgacgatgccgatgagcagctgcaggccggcctcaacgccgccgtggacgatatcaactggtcgctaagctacagcctgacaaaaaacgcctggcagcaggggcgcgatcaaatgctggcgatcaatatcaatatccccttcagccactggctgcgttccgacagccgctcggtctggcggcacgccagcgccagctacagcctgtcgcacgatctcaatggccgcatgaccaatctggcgggcctgtacggcaccctgctggaagacaacaacctcagctatagcatgcagaccggctatgccggcggcggcaacggcgacaacgggagcacaggctacaccgccctcaactaccgcggcggctacggcaacgccaacgtcggctacagccgcagcgatggctttaaacagctctattacggggtcagcggcggcgtgctggcgcacgccaacggcatcaccctgagccaaccgttaaacgataccgtggtgctggtgaaagcccccggcgccggcggcgtgaaagtggaaaaccagaccggggtacgcaccgactggcgcgggtatgccgtcctgccttatgccactgagtatcgtgaaaaccggatcgcgctggataccaacaccctggcggacaatgtcgaccttgacgatgcggtggtcagcgtggtgcccacccatggggcgattgtccgcgccaactttaacgcccaggtggggatgaagatcctgatgacgctgacccatcgcggcaaaccggtgccgtttggcgccctcgccaccggcgacagcaaccagagcggcagcatcgtcgcggacaacggccaggtctacctgagcgggatgccgctggcgggcaaagtgcgggtgaaatggggcgatggcccggacgctcagtgcgtggccgattaccgtctgccgccggagagccagcagcaggcgctcagtcagctttcggtcgcgtgccgctaaggagatcatgatgagaacactgcagtatctgctgggcgccctgttcaccctgggcgcaccggctgcgcttgccgccgatagcacgatcaccatcagcggctatgtccgcgataacgcctgcacggtagccggcgaatcgaaggattttactgtcgatttacaggataacgccgcgaagcagttttatgccgttggggcaacgacgccgccggtgccgttccgcatcgtgctgtcgccctgcggcacttccgtcaccgcggtgaaggtcggtttcaccggcgtggcggacagcgtcaacaccagcctgttaaaactcgatgccgggacctcggcggcggcaggaatgggggtggaaattctcgatcagcagcagtcccggctgccggtcaatgcgccgtcatccaccatgacctggaccacgctgaccccgggccagaccaatattctcaacttttacgcccggctgatggccactcaggtgcccgtcaccgccgggcatgtcaatgcgacagcgacattcaccctggaatttcagtaagcggaggctgaaatgaaatggactcatgtgggctggctgctggccggcctgttaaccgcgagcgcttccctgcgggcggccgacgtcactctcaccgtcaacggcaaggtggtggccagaccctgcacggtttccaccgtcaatgccaccgtcgagctgggcgatctctatacctttagcctgatcggtgcgggctcggcatcggcctggcacagcgtggcgctggatctgagcaactgccccgtgggtacttcacgggtgaaagccaccttcagcggaacggcggacagcaccggctattacaaaaaccagggaacggcgggcaatattcagctcgaactgcagaacgaggacggcaccacgctgaacaatggcagcagccagtcggtacaggtggatgaggccagccagtccgctcgcttcccgctgcaggtcagggcgctgtccgtcaacggcggcgccacgcaaggcaccattcaggcggtgattaacgtcacctatacctacgcctgagccaggagagcatcatgatgaaaaaaataatccccctgttcaccaccctgctgctgctgggctggtcgatgaacgcctggtcctttgcctgcaaaacggccaccggggcgacgattcccatcggcggcgggtcagccaacgtctacgttaacctgaccccggcggtgaacgtcgggcaaaacctggtggtcgacctctccacgcagattttttgccataacgactatccggaaacgatcaccgactacgtgaccctgcagcgcggatccgcctatggcggtgtgctgtcgagtttttcaggcaccgtgaaatataacggcacctcttacccgttcccgaccaccacggaaaccgcgcgggtgatttatgattcacggaccgataaaccctggccggccgtcctgtatctgacgccggtgagcactgccggtggagtggccatcaccgcaggatcgttaatcgcggtgctgatcctgcatcagaccaacaactacaatagcgactccttccagttcatctggaacatttacgccaacaacgacgtggtggtccccaccggcggctgcgatgtctccgcccgcgatgtcaccgtcaccctccccgactacccgggatcgatggccgtgccgctcaccgtccactgcgcgcaaagccagcagctggggtattacctctccggcaccaccgcggacagcgccaacgcgatcttcaccaataccgcctccgcctcgccggcgcaggggataggcgttcagctgacgcgcaacggcagcgccgtcccggcgaacagcacggtctcgctgggcaccgtcggcacctcgccggtcaacctcggcctgacggccacctatgcccggaccacaggccaggttaccgccggcaacgtgcagtcgatcatcggcatcacctttgtctatcaatgatgaccgattatatcctctcgccctgctcgctggccgcccgcgggttgagccagctgatgctgaacgccgcgaagcggcccgttgagctgccggtcgagggcgtgtccctgcgcgaactggccgccgtgaagcggatcgtagtgtatctccctgacgatcccctgtggatgctcaccacgctgcgccaggcggcaaggctactcgacgaggccttgccgccgttaccgatgttgattctgagccgcagcccggccatctggctgtggcaaacgctgctctatcaggtgagtcatccggatcgtctgcgcaacgtccatactgcccccgccgatctgtcctgcgcggagctggcccatcggctggagaatgcgccgcggcttgagcggcttgccagcgaagccgccctgatccacggaaaacgggtcgtcgggttgacccacgccgagctcaaggtgatcctcgccctgctgcaagggcagacgataggcgagcaggcccaacgtctcggattgagccagaaaacgctctacacccagcggctggctggggtgaaaaagctggtggaatgtcatccgcatctggccccccgctttccgcgcacgctgctgccgcgctcacccgcaaacgcactgacggcgtttgaacaggaatgggtacaagcgattcacgatcgccaggtcttcccggtttttcaacctatcgtcgatagtcgctcacagctacagggggtggagatcctgatccgctggcgccaccgcggccaggtacttcacccccagacctttctaccgcacttccgcgccgactacacctggctactgcttacggcctttgttctgcaggaggccgtgcagaatattaatgagtatccaggcaccttctatttttcggtcaacataccctcctcactcgccgacagtgacagcctgctgcggatggtggaagccgctcgccagcagcttcggcagccagagggcgtggcaaggctggtgctggaatatgctgaaactatcgattttcgccatcagagccgctccgccgcccacgtggcgcagctgcaacgtgctggcgtgcgcgtgatgctggacgactgcttttctcaggggagcgttatctttccggcgcgtcgactgcacttcaatgcgtataaactggatatgagcatcgtcaacgacgcccagcacgatccgaaggcgcttgcgctaataaaaagcctggcctactactgccagttaagcgacagtcgctgtgtggcggaaggggtggattcactggcgaaatttacgcagttaaaatcgctggggattgatcgcttccagggctatctgttttcaccaccgatgcggcgtgaacatctcccggatctgatccgccgcttttcccaccagcgcgatccggcggatcgttgagggtgcgagaaaagcgcaccggttagcaccggtgccggtacgtcatgcgcgaatatcgtcgtattcgcgggtgttatcgaattcatgtttggcaaacgggcagagagggataatcttccgctgctcctggcgcattttttccactaccttcgccaccagctgtttccccacgccctggcctttcaggctgggatcaacatcggtatgttcgataatgctgaggtgttcgccggtgggaacaaaaacaatctccgccacctggtttccctgcgcgtcgttaacataaaatttgttatgcccttccagtatttccatcttctcctcgcttatttatgacgatattgcagagcgccgctcgggcaggtatcaatcacgtttaccaccgtcgcgacatccacttcatccgggataatccacggcttacgcttcaggttgaagagcttcgcgctgccgcgcacgcagttcccggaatgctgacagatcgccgtattaaagtagacgtcgattttctccccggtgtaggcccggtagccggcttccagtaattccttatccatgacattgcctcggtcgtttttatctttcaggctaagcatagccctcgccgtggcggctgactatgcgcaagcgcgggaattgacgcctcacatcatgctctcccatcgcacaaggatcccgcagtcaacgatcggttgactttcattcccgcaacgaggcgattacactcatgacacactggtatgatcactcagggatgttccattgaatcatattgccaccatcgcccgcccggcgcggttactgctcgtcttgccgctttccggctgctcactttcgccagagatcccggtattgggcgctgcttttcccggctggtttttctgcttactgggcggtgcgtttttactgatcccctgccatatcctgattacccgtaaaggctggcagccgcgcttttctcccctggtcttcagctacgtcgcgctgatgttcctgttcgccacgttgctgtggtttctgttttttgttcactgatcgcttatgacaacttcccgcacttccctgttacgcaaaaagtggcctctgctggcgctggtccttgccgccatcctggcgctgatcctcgttatctggcagttgcaaacctcgccggagaccaatgacgcctatgtctatgccgataccatcgatgtagtgcccgaggtcagcggacgcatcgtggagatgcccattcgcgataaccagcgggtgagaaaaggcgatctgttgttccgcatcgacccccgcccctatcaggcaatgctcgatgacgcgaaagcccggctgacgaccctcgacgcgcagatcatgctgacccagcgcactatcaaagcgcaggagtataacgcccagtcggtggcggccgccgtcgagcgcgccagagcgctggttaagcagaccacctccacgcgtatccgccttgagccgctggtgccgcaggggttcgcttcccaggaagatctcgatcaggcgcgcaccgctgagaaagcggcgcgggcggagctggaggccacgctgctgcaggccaaacaggcctcggcggccgtgaccggcgtggatgccatggtggcgcaacgcgccggggtcctggcgcaaatcgccctcgctgaactgcatctggaatttaccgaagtgcgcgcgccgttcaacggcgtggtggtggcgctgaaaaccaccgtcggccagtacgcctcggcgctgaagccggtcttcaccctgcttgatgacgaccgctggtatgtgatcgcgaacttccgcgaaaccgacctgaacaacgtgcgccccggcgtggcggcgcggatcaccgtgatgaccaaccacaaccggacctttaacggggtggtggattcggtcggctccggggtcctgcccgaaggtgggagcgtcatcgaagggctgccgctgatccagaaaagcattaactgggtccacgtctcgcagcgcttcccggtgaaaatcgccgtcagcgatcccgacccggaactgttccgcatgggcgcctcggccagcgccgtgctgcagccgtagccgggcgacgctatgtttcctctcgcccattttttacgccaggaactgcgcgacgcgccgggacgcgccagctacacgctgcgcctgacgctaagctgcgcggtgctcatcaccctgtttatgaccctgcagatccctttcctggccgttgcgctgatcgtcgtgttctacgtcagccagcctaacgtgttgatgattaagctggtcagcgtggtcttttttgtcaccgtcaccgtggcgctcggcggcgtgctgctgatcatcaagtggacctatgactacccgctgatccgcctggcggcctccgtggcgctctttttctgcgccctctatctgatgcgggtgctgggcaagctgggactggcctttttcgtggtggcgctggcggtgatttacgctcagaccttcccgtcgatgaccagccagagcgagatcctggtgcggctgctgctttggctgtgggtggcgattaacaccgcgatcctcgtcaccctgctggtcaacgcctgctttcagcaggcctttcccggtaaccagtttaaggcgcgcctggccgggatgctgcacgaggtcgcccggcggctggcggccccggacgctgaagcgccaccgaccttcggcgagaccgccgcgcagttcaatcagctgcagtcgctgttcgcccaggccagccgggcgacaccggagatcgccgccgatcccctggcctggcgctcgcggctggccgccactttgcgctgctaccagctggcggccctgctgcaagcagacgaggcggatagtgacgatcgccagcagctgtcgcaggcggtacttcagctgaagaacgcccttagcgaggagccgtttgacggcgctattcctcccctgacgctcagcggtcgcggcgtcaatcgcgctgttctgcaggagatggctaccactctgcagcggctggcgcagggtgagccggttgccctgccgcagggtgaggtggagaaggcgcccctgctggcgccggacgcctggcgcaacccggcatatctccattttgcgctcaagaccctgctggcgaccctaatctgctatgtcttctataccgctgccgactggcagggtctacataccattatgctgagctgcgtgatcgtcgcccagcccgggctgggcgccacgatgcaaaagacatggctgcgcatcggcggggcgctgctcgcctccctgctggcgctgctgttaatcgtctttgtccagccctggaccgattcgctgacgggcctgctggcgatgtccctgccggtgctggcgctggcggcgtggattgccgccggctcggagcgtatcgcctacgccgggatccagattggtttcacctttgcgctggcctttctcagctggtttgctccgctgacgaacctcaccgagctccgggatcgggtgctgggcatcctgctcggggtgctggtctcctccattgttcatttgtatctctggccggacagcgaagcgccgcagctgaaaacccgccttgcggcactctatcgccggctggcggactgcctcgccgccccgaaggaggcggttccgctggctcccctgcttgtcgccttcaccgacagcgaagcgctgatccaccgggttcgcgccgaaccgctgggcacgtatgctcacccctggccccaggcgaaagactggccgatgcgcgccaccctcgcccaggccgaggagatcgcccgcctcagcgaaggctaccgactcaacgccgcgccgggagacccgaccctggcccgctgcgccgaacagctgcggcgctacgctgaacgtatcgaacaggaggcgacggcgcctggcgaacagctgaccgccgaactgactaacccctttggcccggcgctggccgccgcgctggccgccctgcccgactgggggccgacaccgatagcgactgagcaacaggctaaaacgtcatgatgatccttcctttctccgcgcgcctgcgcggcactctttttaccctgacgctgacgttgctcagcggctgcgcgctgatccaggatgagcctgcccaggtcgccatcgtcaatccgcagcaggcccagctggcgcaggtgatccacctggcgaacagcgactggccggccgcccgctggtgggaggcctatgatgatcctcagctcaatatgctgatcaaccgggcgctgcagaactcgccgaccatgcaggccgcccggctgcgcatctcccagtcgcagtccacggtggaactcgcccggtcggcgatgggcctgcaggctaccgccgtcgcggcgcaaaaccgcctgcggatcaccgacaaatcctttagctggccctactcatactccctgccggtggataaaaacggcccctggtatacgctgaataccgttggcgtcggggcgcagctgaatatcgatctctggggggccgatcgcgcccgggtcgccgccgctattggcgagaaaaacgcccggctggcggagaccgccggcattgagctcgacatcgccagcagcgtggcgcagctctatttcgccatgcaggcgacgttccagaaaatcgcgctgctgcaggagctggagggcattgcccgattctcggtggaagcccacgagcaccggacccggcgcggtctggaagacagtgtggatgtggccaacgcccaggccgaacagctcgccgctcgccagcagatcattagcgccgaggggatgctgacccagtatcgtgaaaccctgcgggcgctgatcggcgccgatgcgcagagcatgccggccatccatccggtggcgctgccggcgctccaggagacgctgccgccgtcgctctctttcgagctgctggcccgccgtccggacctgcaggcgctgcgcggctacgtcaccgcctccctgagccaggtcgatgcggcgaaagcggccttctacccccattttgatatcaaagcgttctggggctataacgccctgagcgtcggggatctgtttaagtcctctttccagcagatcaacctgctgcccgggctgtatctgccgatcttcgacggcggccgtctgaacgctaatctgcagtcggtacgcaccgccagcaacatcctgatcaaacagtacaaccaggcggtgctggatgcggttcgcgatgtcgccatcagctccagccagcttaacgacctgaatcagcagcgcgcgctgcagcagctaaaagtcaccgcggcgcagaccaccaccgatagcgctcgcgctcattatcagcgcggcctcctcagccgctacgccgccgaagaagcccgccgggcggtcctcgcccagcagctgttgctgctggacattgaggcccagcggctaagcaccgacattaccctgatcaaagccctgggcggcggctatcgagggcagtaacaaaaatgccttcccaataggggaaggcattaagctgaagaggcggggtggatgcgcggcgattacaccagggcgcgcagctcttcccgcatataggtggaaaagaattccggatgcttaatcaccagccgttcgccggcggcgacccgttcagcccactccgccactttgtcggtaaacccagcgctccagccctgctgttggccgcgcgcagcgacgtcggccggggtggcgggtacgcccagttcttttaaatatttgagaattcccttcgcggtactttcatccatagactgtggtactggctcagacgtattcataccaccgatgaaatccaatgctttatcaatgactgctggcataggtgtgtccttatattaaccacatagtaaacctgactacactatggaccggaaagcgacgtgatttcaaagaacacgctcacgttatgggacatcgcgcattgtgaaaaggggattttgttctgctggggcggggattggacaaaaaacaagccggccccgtagggccggcctgaggatcgcgtcaggcgttgctgagggatttttgcgcggcgctggaccgactgttctccagcatccggcggaccgggacaatcagcacggccagcacggcggcgcagatcagcaatgcgatggagcagcgggcgaagaggtccggcagcaacgacagctgatcggccttcacatgaccgccgatcaggcccgccgccaggttacccagcgcgctggcgcaaaaccacagccccatcatctggccgcgcattctctccggcgccagcagagtcatggtcgccagcccaatcgggctgaggcacagttcaccgagcgtcagcatcaggatgctgcccaccagccacagcggcgacacaccggccccgccgttgctcagaacgttctgcgccgccagcatcatcaggccaaagcccgccgctgcgcacaggatgccaatcacgaatttggtcatactgcccggacgaacgtttttacgcgccagcgcaggccacgcccagctgaataccggcgcgaggagaatgataaacaaggcgttaatcgactggaaccagaccgcggggatctcaaaatcgccgatcatccggttggtatagtcgttagcaaacaggttgaaggaggtcggtttctgttcaaacgcggaccagaaaaaggccgccgagaccagcaaaataaagcataccagcaggcgcgcccgctctttacggttgagtccggcgaagacgaacagccagatgaaatagagcgccacggaggcggcaattacatagaccagcacgctggccaccgccaccgggttaatcacgatcgtgcccaggctgataagcgtgaccagcaccgccactcccagagccagcgccagcagccacgctccaacgccattctttttcgccaccgggctgttccaggtggaatcgaggccaacctccgcgtcatagcgcttcatcgacggtacggcaaagacacggaaaatgatcagcgccaccagcatcccgatccccccgatgccgaagccccagtgccagccatgcgatttgataagccagccagagatcaatggcgcgataaacgagccgatgttgatccccatgtaaaacagcgaaaaaccaccgtcgcggcgcgcgtcgccctttttatacagggtgccgaccatcaccgagatacaggttttaaacaacccggaacccaggacgataaacatcagaccgataaagaacagatcgttgcccagccatgctgacagagcgatcgacaggtgccccagggcgatcaggatagagccgtaccagacggcgcgttgttggccaagccagttatccgccagccagccgccaggcagcgcggccagatacatactgccggcaaaaatcccaacgatcgccgaggcgttctctcgcgccaggcccatgccgccgtcgtacactgtcgccgccataaacaggatcagtaaaggacggatgccgtaaaacgagaagcgctcccacatttcagtgaagaacagggagcccagcggataaggatggccgaaaaaggtacggctttcgtttttattaacagaggaatgcataaattctccaggtaaggtgcgccgcagcgcaagttaaccgtataaagcaggctgacgatttataatttgtttgcattaacatcaaacacgagcatttttaaccatttgataaccacgcaatggttttgtccagccccttaccttccctttttagatgaaaagtcgacaaacatctagttttacagatttaatgttcgcaataatgcaaacgacgttgactttatatcattacgcacaaaacgaaattttacccattaaaaacaaacagttaataatttatcgagagacataaaccaccggcgcagaggcggtgtataacggcaggaaaagtaagggaaacagactggatagtggagaaatagcgctaagcgagaatattgtcagcaatccaggcgctacatacctggagagcctaccatacagcaggtttaacacggcatgccggctgctacagccggcgccattctgcgcgctatttcacacgctgccctgcggcatcaatgactggctcaccgtcctccttcacgaatgcgcctttttgtggcgccgtcaggatctccagcaccacctctgacgggcggcagagtcgggtgccctgcggcgtcgttacgatcggacggttaatcaggatcggatgctgaagcataaagtcgattatctggtcgtcagtaaaccggtcttccgccaggcccagcgcgtcgtagggttcgacgtttttccgcagcagcgcgcgcaccgggatccccatcgcggcgagcagctggcgcagctcatcacccgacggcggcgtctccagataatagataacggtgggctcggcgccgctgttacggatcagcgccagcgtattacgcgaggtgccgcagtcagggttatggtaaatggtgatgctcatagtacgttctcatggctggttgaaggagagacgcagcgccagcgcggccagcgtcacaagcagcaccggcagggtcatggtgatgccgcagcggaaataatacccccaaccgatggtgatgtgcttctgcgccagcacatgcagccacagcagcgtggccaggctaccaattggcgtgatcttgggccccagatcgcagccgatgacgttggcataaatcatggcctctttgatcgtccctgttgccgtgctgccatcaatcgacagggcgccgaccagtacgctgggcatattattcattattgaagagaggaaggccgacaggataccggtgcccagcgtcgcggcccagaggccgcgctccgccagcatgttcagcaccgtggtcagataatccgttaacccggcgtttcgcagaccatacaccaccagatacattcccagcgagaagatcactatctgccacggggcgccgcgcagcaccttgccggtgttaattacccgcccgcgcttcgcgacagcaaacaggatcccggcgccgagcgccgcgatggcgctgaccgggatccccagcggttcaaggacgaaaaagccagccagcaacagcagcagcacgccccagccggtgcggaacgtcgctggatcttttatcgccgtggccggcgcttttagtaacgccatatcccaggccggcgggatatccttgcgaaagaacaggtgcagcatcgccagggtggtgaggatcgccgcgagatcgaccggcaccatcaccgaagcgtactccctgaagccgatggcaaagaaatctgccgaaacgatattcaccagattcgacaccaccagcggcaggctggcggtatcggcaataaatccggcggccatgacaaaggccagcatcgttcccttgctgaaccccagcgctcgcagcatggcaatcacgattggcgtgaggatcagcgccgccccatcgttggcaaacagcgccgccacagccgcgccgagcaggataatccaggtaaacagcagacgaccccggcctcttccccagcgggaaacgtgcagcgcggcccattcgaaaaagccagactcatcaagcagcaggctgataatgataacggcgataaaggtggcggtcgcattccagacgatatgccataccaccgggatatcggctacctgtacgccaccggtggccagcgccagcgccgcgccaaatgccgcgctccagccgatccctaacccccgcggctgccagatcaccagcaccagggtcaggataaaaatcgtacctgccagcaacatcgttcctccgccaatcacattcgaaaaatcatatatgttaagataaattttttaccggcaacccggcccgccagccagtctgctgatcatcagccgcacatcctcctgctgactgagccaggcctgctcaatcacctgcgccgcccaggccggcatctgcggagagaggcggtaatggacccacttaccctgtttacgatccagcagcaatccgctctcacggagcatcgccagatggcgggagatcttgggctgggactgggcgagcgccgtacagagatcgcacacgcacagctctccacgcgccttgagcagcaatacgatccccagccgagtttcatcggcgaggtttttgaacagttgcaggggcaataaagacatgatttctcctcaagcgtgacggacagcatacggggccacaaagaaagatcaatatacatgcgcaaaaacatatatattaattcacgtctgcgatgagcatccgggatgttgcgccccgccatccctgctaaatagcacggaaaaatgccgcgttttcttttatccatcatcgaaatatgtcaggctggagatcccattggattgccagggctttcaggatgagtacgatttatgtggttgttttaacgtatataaaaccgctcgaagaggttgaccgtgcgatccccgcccacatcgaatggctcaaaaaaggctatgccgacggcctctttctcgcctccggccgccgtattccccgcaccggcggcgtcattctggcaaaatgcgatagccgggaaactctgcaagcgcgtctgagccaggatcccttccagcagctgggtctcgcccgtacagagattattccctttgaggccagcatggcgtcacccgcgctgcagtcgctgttataaccctgtctgaaagcatatcccggaggaaaaatgcagccgtactttcactggatcaatgaacctgccgagtggcgccgcgattccgacggcctgacggtggtcactaataagcataccgacttctggcgccatacctggtatggcttcgagcgcttctctggccatctctatgccgcagaagtggcgggcgattttaccctgcaggcaaaaatctgtgcggatttcaccacgctttacgaccaggccgggctgatgatgatggccgacgagcagacctggctgaaggcgggaattgaattcaatgacgatgccccggccatcggcagcgtactgacgctaacccactccgactgggccaccgggcttttccccggcgacccgcgcaccttctggctgcggctgacccgcaagggcgacgcgttaaggctgcagtattcaaccgacggcgagcgctggccgctgctgcggctcggctactttccgccaggcccggtgaaagcgggcgtcatgtgctgctcaccggagcgtggcggactggcggttgcgtttcaggatattcagctttccccgccgctggacaaagcgctgcacgatctgagctgaacgctagcgggaagacccgactttctctgcatcatccgcggcatgcattatcaggaaatcaatcagggctttcacccttttcgttctgcccgcgttttttgggtaatagagataaaccggcggataggttttccagtagtcctccatcacgggaataaactgctcacgatcgggctgtaattgcaggattggttcaaataaacggccaatccccagtccgtggcgaataccgtcggccatgacgtcaatatcattgctgattaactgtccgggcatctcgacggtgagctgctcgccgtggtcattgaggatcagcggcaggatgcggttgttggtaataaagcgatagccaatcagccggtgatgatggagatcggcaggcatcgcgggcacgccatattcggcaagataggcagaggaggcgtatagcccttcacgaaacggcttcattaacgggcgggcgaccacgccgccttcgagaatatcgccaaagcggatcccaaggtcgaaacgttcttcaataatattgacggtaccgtcatagaccgatatttccagctggatccccggatattgctgacaaaatgccgccatcgccggtttgagaataagcaggtaggcaaagcgcgagagggttattctcactgccccggagggctcctgattctggtcgcggatgatttccagcgacttttccagtgtctccaccgccgcggcggtctgctccagcagctgttgcccggtttccgtcagctcgatacgccgggtagtgcgcacaaaaagggggtggccaatatgctcctccagcagcctgagcgcattgctgaccgacggcggcgtgatttcgagcttgcgcgcggcggccgagatattgccctcgcgcgcaatgctctgaaagatgcgtatctgattataaagcgcgttattcatagcatctccttaagacaccctcgcctgattattaagtacaggctaaatattcttaagtcaatgaccgcctaatcttccccccctgcggctcgtatacttttgtctcttcccgctgataacgactttccggagacaactatgcgaattttatgtctggatatccctgcccccggcgcgacgctggaacactatgcgccgcaccttaccgcagaagccctgcacgcctggggactgtacaagtcaggctttattcgcgacatctatttccgtcaggatcgacccggcgtcgctattttcctcgagtgcgacaccgtggaagaggcgaataatgtcatggccgaatttccgctggcaaaagcgggtctattaaccttcgagtgtattccactcggctcgtttattagctgggaaaatctcttctctgctgaatttaaacatcaggagtaacgttgggaatggctcatattcttgtcgtttccgggcatccggatcttaaccattccatcgccaacgccaccatcctcgatgagctggcgaccgccctgcctgatgcggaaatccgtcgtctggactggctctatccggacggcaaattcaacatcgccgctgagcaggaaagcctgctgcaggcggatgtgattgtctggcagtttccctttagctggtatgggctgcccgggttaatgaaacagtggctggacgaggtatttgtccacggcttcgcccatggctcaacggcgaaactgggtggtaaaaagctgatcctctccttcaccacgggagcgccacaggcgctctataccgctgacggtttctttggccatgccattgaggagtatctccttcccttcgagaccacggccaggctgtgcaatcttgagctgctggcgccggtttatacctgcggtattagctacgccgaccgggatgcctacaaaatcgctcagcaaaaaacgcttgcccgggaacacgcggccagactgatcgcgcagcttaaaactctggtggaataacccaaagggagaaaataacgatgcagtatacccggctcgggaagagtgacttactggtctcccgtatctgcatgggatgtatggggtttggcgatccgtcaacgggtcagcatcgctggacgctggacgaaacagccagccgggacatcatccgccacgctctggaacagggcatcaatttttacgataccgccatcgcctatcagaacggctccagcgaacggtacgttggccgggcgctgcgggagatggcaaaacgcgaggaggtggtgctggccaccaagtttctgccacgaaccgctgcccagattgccgaggggatcagcggaaaacaggcgatagcccgctcgcttgaccagagtctgcgaaacctcgggatggactacatcgacctctacatctaccacatctgggattacaacaccccggttatcgacgtgctggaggcgctgcacaccgcagtgaccgccggcaaggtgcgcgcgattggcatttccaattgctatgcctggcagttggcgaaggtgaacgcccttgccgaacgcgaagggctgacatcctttgtttctgtgcagagccactacaacctgattatgcgtgaagatgaacgagagctgttcgggctgtgcgcggaagagggtatcgccatgactccctatagcgcgctggccagcggccgtctctcccgcttagaaggccacacgcggcgagcggtggaagatgattatgcccggggcaaatacgacggcacggcagagcaggaccggatcattattgcccgcgtcgccgaacttgccgaacggcatcaggtctccatgaccgaaatttcgctggcctggctgctgactaaagtcaccgccccggtgatcggcgccacgcaaaagcatcatgttgacggcgcggtcaacgctgtagcccttcaactgagcccggaagacatccgttatctggaagaagcctaccagccgcacgttctcacaggcgtgatggcgcaaaacacgccgcaagccaaagaccatcatcaggtgtggacgcggtaaccctctgtcctgttcagcagggagaataaaacatgaaaaacgtgattgccgcggcagccttgtcgcttgtgctgtctgattttacttatgcccacgaacaaagagatgaagctatgatgaaaattaccccttccacccttgcggacgctgatattcaagcggtctccccggcgctggcgcgcttcggccgcgaggccatcagcaacgacctctggcaacgtgacgccctgtccgcccgcgaccgtagcatcgtgaccgtagcgatgctgattgcccgcaaccagccaggcgagctgaagcactatattgccgttgcgctcgatagcggcgtgacgccagcggaagtgtcagagatcattactcacctcgccttctacgctggctggcccaatgcgatgtcagccgtcagcgtcgctaaaaccatctttgaagccaggggcgtgacggcagaggccctgcccgccgcctcgccaacgctgctgccactcaatgaacaggtagagaaacagcgtgcagacaccgtggaaaaaaatgtcggccccatttcgcctggcctggttaaatttaccgccgacccgctgtttctcgacctctggcaacggcccgcgcttacgccccgcgacagaagtctggtgacggtcagcgcgttaatcgccgccggacagagcgcgcagattggctaccacctaaacagagctatggataatgggctttcggctgaagaggccggagaagtagtcgcccaggcggcgttctacgcgggatggccaaatgcgtttaccgccgccccggtggtcggtgaggtattacgatcgcgcgagagcaaaactgaataaaaaagaataaaggacagggaagctgtcctttatttatcgttaattgttaatttaaaggtaccacgagggctttcgattaggtctcgcggaaagaacataaacggtctatcgaagtatggagacttcgatcgtgagtctgttcacatcgctcattgagaaaattgccgttccgtatgccgtcatgagtctcatcctttgaaagcagcgatcgctgtggcgagacggtagcgcggacatgtctatttggtccagagatggacatctcaatttagctactacaccgctacttcgattgatgtattttatattaaatatcaatgaattgaattatacatttaatataaattgatgttatagcaatcgctatacaggctccttagtcatgactgaccgggccacaccgcatatcgcaagaatttgctctctcagccagcggtgaccggggtcgcgttccattcttgggtgccacatctgcgataccgtaatacgacggcttttgaacggcagctcgaaaaggtgtacctggtccgttacctgctgattgagtaaatagagtgcgggtatcatggcgataagatccgattccagcgccacggaaagtgctgtcggaaatcccggtacgacgcttgcaattttacgttttgtccccagttcggccagcgcatcgtcaacggatccgtgcaacgcgccctcgggtgacgctaccacatggccccaggcgacataatcactcacgcctatttcagcctgcttagccagcgggtgccctttacggacgacgccaacaaaccgatcctcaaacagtcgttgcagccgtatttctggccccatattactctgaacgccaatctccagatcaaccagcccttcccgaagatagcgcgacgttttttccggcttaggcgcgaagcgtatacagacgtccggcgctgcgtcggcaaccgctgctataagcgcaggcccaaacgccaccacaaaaccatcgtttgccctgatggtaaaaagacgcgccagattttgcgcgctgaacgtttcagttgagggctgtaataccgccctggcatcgtgcactgcacgcctggcgcgatcccgggtcgcttcggcccacggggtcagtaccatgttacgcccggcgcgtaccaggatcgggtctcctgtgacatcgcgtaacctgcttaatgtccggctcatggccgaagtgctgaggttcagacgacgagccgcacctgcgacactcgcttcactcagcaatacgtcgagagctaccagcaaattaaaatcgggatcagacattacccttcctcccagcacattaagataaggcgtttgatgcaacaataaagtgaaaatagtgcgccttccgcctggtaaaagccatctttatagttttgtcatccatacactcttctcagaggacaaatgatgacgctcttttccagtcaacccggcgacgaaggactgcctggcccggcgcgcgcacgggtgatggccgcaataatgaccaccaccttaatgggcgtgtttgatggcaccatgatcaacattgccctgccctccatggctcaggagatgcaggtacctgccagtattgccgtctggttcgccaacgggtatctgctggcggctgcgatgacgctggcgatattcgcggcgcttgcggcccgtctgggttatcgccccgtatttctggcgggcctgacgacctttaccctgacatcactgggttgtgcgctggcgaataagcccgaagtgcttatcggtatgcgcgtacttcaggggatcggcggcgcggcgacgctgagtattgcccccgcaatactcaggtccgtatttcccggacgcttacttggccgcattctggggttccatgccctgctcattgcctcgagctccgctatcggcccggtattgggcggtacgatccttcacactcttagctggcaatggctgtttgcgataaacattcttcccggcaccctcgccttactgctggcggtcagagcgctgccgcgggatgcgatccgtatgcaggcgcccttcgacaccgtgggcgccatattgtcggcgctgctgttgggttcgacgatcatggcggcgaacagcctacagaacgctacttctcaattcggcagcctttgctggatggctctcgctgcgctgagcggcatggcttttatctggcaaatccgccgcacgggtcatcccttactgccgccgagcatgtttaaaaatgaacgttttaccctcgcggccttcacgtcgatggttgcttttgtcagccaggggatcacctttattgcgctacccttcctgtttcagagcgaatacggctacagtccggtagtgtctgccctgctgtttacgccgtggccattagggatcgtgctgattgcgccgcatgcaggccgttgggcggacacgatatcagccccggcgatatccaccctggggctggtgatatttgtcgtcggtttgatcctgctggcgacgttacccgccagaccttcaatgtgggatatctgcctgcgaagtctggtatgcggaatagggtttggctgctttcagagtcccaataaccgggaaatgctctcaaacgttattcgtgagcacgcgagttatgcgtccggtgttttatccattatgcgcactttcgggcagtgcctgggagccgccgccgtagccgttctgctggcagcagatgaaaggtcaattcatgttgcgctgtggagcgccgccgcggcctctgcggtatcggtcgtcgtcagcgcgagccggttgcgtaaaatcactcatcctgcggaaacaggataagcgcggaaatatcactaaacgctacgactccagcgccagcagcgcaaaacgccgatcccgcaaccaaagtggagtcctctgccggagttcaatagactaacagaatgctataatcgctgatttatcaagggaaaattgagttgggtagacttcaggagacttgaatttggagcgggcgaagggaatcgaaccctcgtatagagcttgggaagctctcgttctaccattgaactacgcccgcgaagaggtgcgagaagcattatagcccttacgcaccctgtgacaagcctgccggatgctgactggcgataaaataaccttttagcacttaggtttacttccctgcggcggcaggtaacgcagcggatcgatggctgtcgcccggtagcggatctggaaatgcagccgcactgagtcggcatccgtactgcccatggtggcaatttgctggccggccttcacgctctggccattattcaccattagcttatcgttgtgggcataggcggtgatgtaatcctcgctgtgcttaatcatgatcaggttgccatagccgcgcagctgattgccgacgtagaccaccttgcccgccccggcggcatacaccggctggccgcgggttccggcgatatcaatgcctttattgccgccatcggcggtggaataaggcaggaccactttgccgctggtcggccagcgccagcagcgctgtcccaccggcggccaggaggactgaggtaccgcggacgaaggcgtgaccgccgcggtgcgcgtagaggaagattttttcttcgttgtcttcgttgaactgctgccgttaagcttcagcttctgccccacctcaatggtgtaaggcggggagatgttattcaggcgggccagatcgcgaacgctggtgccggtggtgcgggagatgccgtacagggtatcgccgcgtttaacggtgtaggtgccaccggaatcggaggtgctggagcagccggccagcaccaggcttgccgccagcatcagtgtcatataaaagcgtttcatcatcaggcatcctgcacttaacacaaccacttacctcgcaatcagggcgaatatcataccagtccgcggcgcagggcgtcatccctgatggcgaaaccattatcccccgtccctagcgcgcggtctgcggcaggcagaaattcatatttgcgccacgcggcgcggcggcctctcctcactattgcgcgttgccgttcacagagctgcctccagggcttgttttggtaatgcctttctcccatttatgggctaccctagtggcctgagtacatgacccggcgggtttgtgccgggtcattttttattttcaggagtcgtcatggccggggaacacgtcattttgctggatgagcaggatcagcctgccggtatgctggagaagtatgccgcccatacgtttgatacccctttacatctcgcgttttcctgctggctgtttaaccagcagggtcagttactggtcactcgccgttcgttgggcaaaaaagcctggcccggggtatggaccaactcggtctgcggacacccccagcagggcgagaccttcgagcaggccgtcacgcgccgctgtcgcttcgaactcggtgtggagatctctgatatcgcgccggttcacccggccttccgctaccgggcggtcgccccaaacggtatcgttgagaacgaagtgtgcccggtatatgccgcgcgcgtggtaagcgaagtgcagcctaacgacgatgaagtcatggactatcagtgggttgacctggcaaccatgttaagcgcgctggccgccacgccgtgggcgttcagcccgtggatggtgctggaagcggaaaatcgggacgcccgccaggcgctgaccgactttgttgcgcgtctgcgcgggtaagctaactattctccaggccaggcgcagccctgtgcctgtcattaatgcctggcggcgctacgcttgcacaggcctacggttctgcgccattgcgtagcccggataaggcgtttacgccgtcatccgggatccccggcttgcgctgcgctgagccaggctacgccagccttaggacctcacatcagacataaaaaaacccggcaagccgggttttttgcttttcgcgaagggcgattatttctgcggacgcatcgccgggaacagaataacgtcgcggatggtgtggctgttggtgaacagcatgaccatacggtcgataccgatacccagaccagcggtcggcggcaggccgtgttccagcgcggtgacatagtcttcgtcatagaacattgcttcgtcgtcgcctgcggctttcgcatcaacctgatcctggaagcgctgcgcctggtcttcggcgtcgttcagctcgctaaagccgttaccgatctcacggccgccaatgaagaattcaaagcggtcggtgatttccgggttgacgtcgttacggcgcgccagcggagaaacttccgccgggtattcggtgatgaaggtcggctggatcaggtgcgcttccgccacttcttcgaagatctcggtcacgatacggcccagaccccagctcttctccactttgatgccgatagattcagcgatcgctttcgcggaatcaaagttatccagatccgccatctcggtttccggacggtatttcttgatcgcttcgcgcatggtcagtttttcaaacggcttgccgaagtcgaacacctggtcgccgtaaggcacttcggtattgccgaggatgtcctgcgccagggtgcggaacagagattcggtcagctcgatcagatctttgtaatccgcataagccatgtagagttccatcatggtgaactctgggttatgacgaacggagatcccttcgttacggaagttacggttgatctcgaagacgcgttcgaagccgccaaccaccagacgcttgaggtacagttccggcgcgatacgcaggtacatgtccagatccagcgcgttatgatgggtgatgaacggacgcgcggaagcgccgcccgggatcacctgcatcatcggggtttctacttccataaagccgcggccaaccatgaactgacggatgcccgccaggatctgcgaacgcactttgaaggtcttacgagattcatcgttggaaatcaggtccaggtaacgctgacggtaacgcgcttcctgatcctgcaggccgtggaatttgtccggcagcgggcgcagagctttagtcaacagacgcagctcggtgcagtggatagagagctcaccggttttggtcttgaacaacttaccgcgggcggcgatgatgtcgccgaggtcccactttttgaactggtcgttataaacgccttccgccaggtcatcacgcgccacgtacagctggatgcggccgcctacgtcctgcagggtcacgaaggaggctttacccatgatacgacgggtcatcatgcggccagcaacggccacttcaacgttcagcgcttccagctcttcgttttctttgccatcgaagtcagcgtgcagttggtcagaggtatggtcacgacggaaatcgttcgggaatgcgacgccctgctcacgcagcgcagccagcttctcgcgacgggttttcagttcattattaaggtcaattgccgcgtcagcgccctgtgcttgttgttcagacatgttggttcctcataaccctgctttcaaacttgcttcgataaattggtccaggctgccatcgagcaccgcctgagtgttgcgggtttccaccccggtacgcagatctttaatacgcgagtcatccagcacgtaagagcggatctggctgccccagccgatatcggacttgttgtcttccatcgcctgcttctcggcatttttcttctgcatctccagttcataaagctttgctttcatctgcttcatggcctggtctttatttttgtgctgcgaacggtcgttctggcactgcgtcaccaatccggtcgggatatgggtaatacgcaccgcggattccgtacggttaacgtgctgaccaccggcgccggaggcgcggtatacgtcaatgcgcaggtcggccgggttaatttcgatatcgatatcgtcttccacttccgggtaaacgaacgcggagctgaaggaggtatgacggcggccgccggaatcgaacgggctcttacgcaccagacgatgaacgccggtttccgtacgcagccagccgtaggcgtaatcgccaatgatcttaatggtcacggatttaatccccgcgacttcaccttcggattcttcgatgatttcggtcttaaagccgcgcgcttccgcccagcgcaggtacatgcgcatcagcatgctggcccagtcctgggcttcggtgccgccggaaccggcctgaatgtcaaggtagcaatcggcgctgtcgtattcgccggagaacatgcggcggaactcaagctgcgccagcttctcttccagggtatccagctcggcgacggcttcgttaaaggtctcttcgtcatccgcttccacggccagatccagcaggccggcaacgtcttccagcccctgggacatctgatccagggtatctacgatggcttccagggaagaacgctctttacccagcgcctgggcgcgttcgggttcgttccacacgtccggctgttccagctcggcgtttacttcttcgagacgctctttcttggcatcgtagtcaaagataccccctaagaacgtcggagcgctccgtgaggtcctgaatgcggttttttaccggatttatttcaaacatggtcggtttcttttaatggatttgtcaaaatgcggtgataagagcggaattctaccggattcgcgcccttattcctacactgttgtcaatttggccagaggtgatcgatgatcagctgcaggctacggttgccgcggaactcgttgatgtcgagcttgtaggctaactggacttcacgcacgccgttatccggccagatggaagtatccacgttgaaggcgataccgtccagcagcggcccgccgtcaaccggttcgaccatcaccttcaggtgacgctcgcccaccagccgctgctgcagcaggcgaaaacgaccgtcaaacagcggttccgggaacatctgcccccacggcccggcgtcgcgcagcatctgcgccacttccatgctcatctccgccgccgccagcgggccatcggaaaccacctcgccctgcaacagcgcaggatccagccattcggtcaccagctcgccgaagcgctgttgaaactcttcaaaacgcgcctcctccagcgataagcccgccgccatcgcgtggccgccgaacttcaggattagcccgggataaagcgtatcaaggcgctccagcgcatcgcgcatatgcaacccctgaatggaacggccggagcctttcagcgtgccgtcgccggtaggcgcaaaagcgataaccgggcgatggaagcgctccttaatccgcgaggcgagaatgccgactaccccttgatgccattgcggatggtacatcgccagcccgccgggcagggtatcggcgctgcgctccagctgctgacagagcgttagcgcttccgcctgcatcccctgctcaatctctttgcgcgtctgattaagcgcatcgagctcgttggccagcacccgcgcttcgccgatgttgtcgcacagcagcagcgcgacgccgaccgacatgtcgtccagccgtcccgccgcgttcaggcgcggcccgagggcgaaaccgaggtcgctggccgccagcttttgcggatcgcggttggcaatttccagcagcgccttaataccgggccgacatttgccggcgcgaatgcggcttaacccctgccaggtgaggatacggttattagcatccagcggcacgacgtccgcgacggtgcctagcgccaccagatccagcagctcggcaaggttcggcgcggggatgccgcgagcgtcgaaccagcctttatcgcgcagaaaagtgcgcagcgccagcatcagataaaacgccacccccaccccggccagtgattttgacgggaagtcgcaatcgcgcaggttgggattaacgatagcttccgccgccggcagcgtctcgcccggcagatggtgatcggtcaccagcaccgggatccccagcgcatgggcatgatcgacgccggcatgggacgagatcccgttgtcgacggtcatgatcatctgcgcgccgcgagcatgggcctgatcgaccacttccgggcttaaaccgtagccgtcttcaaagcggttcggcaccagataggagacgttgccgtaacccagcgcgcgcagggccaacacgctgagcgcggtgctggtggcgccgtcggcgtcaaaatcaccgaccaccacgatgtgcaaccctttctggaacgcgtcatgcagcatctcgaccgctttttcaacgccggtgagctgcgtccaggggagcatgcctttgacgctgcgctccagctcctgcgcgctgcgcaccccgcggctggcatatagccgctgcagcagcggcggcaggtcggcggggagttcgacgccgtcaatcgcctcgcggcggcgtagttgtatctgttgtttcacgcgaatcagttaccgcttgtctgttttttgtgctcatcaaggaacgccttcagctctttcggcccctgatagcccggcagcaccatgccgttactgaggaccatcgccggcgtaccgttgacgcccatctgcacgccgagggtgtaatgtttggcgatatctacgctgcagctcgccggctgcacgcctttaccattcatggcgtcatccagcgctttgttgcgatctttcgcacaccagatcgctttcatatcctgctcggcctggctttgcagcccctggcgcgggaaggccagataacgcacggtgatccccagcgcgttgtagtcgctcatctgctcgtgcagtttatgacagtagccgcaggtaatatcggtgaagacggtgatgacgtgctgctccttcggcgctttgtagacaatcatctcattgctcagcgcgttcagcttacccagcagcagctggttggtgacgttgaccggctgcgcgccgctcacgtcgtacatcggcccctggatgatatgtttgccgtcgtcggtcacgtacagcacgccgctgtcggtcagcaccgtgctcatcccggaaaccggcgatggttgaatatcggtgctctgcacacccagcttcgccagcgactgtttaattgccgcgctatcggcgtgcgccgctcctgaaagggaggccgccagcagggtgaacatcaataaaccttttttcatactcagtccttttgttcagcactcacgcccgcgggtggtgctgttgatgaagttgtcgcagacgctcggtcgccacgtgggtgtatatctgcgtggtggagagatcgctgtgtcctaacagcatctgcaccacgcgcagatcggcgccatgattgagcaaatgcgtggcgaacgcatggcgtaacacgtgcggggaaagcttttcgctgtcgatccccgccagtacggcatagtgtttaatccgatgccagaaggtctggcgcgtcatctgctgggcgcgctggctgggaaataagacatccgacgccacgccgttcagcagccaggggcgaccatactcgaggtaattttccacccacagtaccgcctcttcccccagcggcaccagccgctctttgttgccttttcccaccacccgcagcacgccctgccgcaggctgatgtcgctcatcgtcagccccaccagctccgagacgcgcaggccggtggcatacagcacctccagcatcgctttatcgcgcaattccagcggctgctccaccagcggcgcctgcagcaggcgctcaacctgcgcctcactgagatcttttggcagccgctgcggtagcttcggcgaggccagcagcgcgctgggatcgtccgggcgaattttttcccggtacagatgctggaaaaaacggcgcacggcgctcagcaggcgcgcggtgctggtggctttgtagccgccggactgccgctcagccagcagcgcctgcagatcgtcgctgccaacgcttgccagcgacaggccgcgatggtgcaaccactcaactaacatcgtcaaatcgcgacggtaggcgctgagcgtattctccgccaggttgcgctccagccaaagggcatcgagaaactgttcgattagtgccagatcctgtttcacatcggcctctttgttcgttaaacgctctcattatgccttaagaggacgcctttctggtacactgcccgccattcacggcaagaatcgagatgtttacgcgatgaatataggtctgttttacggctccagtacctgctacaccgaaatggccgcggagaaaatccgcgatatcatcggccccgaactggtgacgctgcacaatctgaaagatgactcccccgcgctgatgagccagtacgacgtactgatccttggcatcccgacctgggatttcggcgaaattcaggaagactgggaagcggtctgggatcagctggacaccctgaacctcgagggaaagatcgtcgcgctgtacggcatgggcgatcagctgggctacggcgaatggttccttgacgcgctcggcatgctgcatgacaagctggcgaccaggggcgtgaagtttgtcggctactggccaaccgaaggctatgagttcaccagcccgaaaccggtgatcgccgatggccaactgttcgttggcctggcgctggatgaaaccaaccagtacgacctgagcgacgagcgcatccagagctggtgcgagcagatcctcggcgaaatggccgaacacttttcctgacgcggcttactcctgcgccggtttttgcagcaccagccggcgcagatcgcgccactctccggcgtccatgctgtccgccgccagccaaagatgctgtccgcgccgggtatcgacatggcgcaaacgcagcagcataccgctattgataacccacggcgtcccgaggatttcccattcggcgttttgccagcgaagacgggaatcggtgagcagttttatctccccgcgacgggcatggatccgccgctggctgcgcacgcagtcgaagaccaccagcgacagcagcagcagccagatcggggtatagctcagcggccagggaaccaacagcaccagggccgccaccacgccgtgaagcagcagggaaaaccactgcgcgcgccaggagatacggagatcagattgccacaggaccacgttcccgattccgtgtctgaattaaggttaccatccgctgcagctccgcatcggccggtttgccgtggttcatcagccagttgaacagatccggatcgtcattttccagcaggcgaatgaacagctgtttgtcagcgtcgctgagggtatcgtactcatactcaaagaacggcatgatggagatgtcgagttcgcgcatcccgcggcggcatgcccagtggatacgtgctttattgttaatgtccatgttgaccttccagcagcaaaatataggttagtttaacccgttttctgccgtaactttacaggaatatcgctgaatgcgagcatccttccataaaaaccttaaaataatgatgggtttattgattccctgcgtcaggcggctgtctcacgccagcgcacaaatggcctgttgaaagcacttgcaatgcactatagctcttttaccattggtcacacacactgcgttaagcgattcaggatatgactatggcttttacaccttttcctccgcgtcagccttcctcttccgctcgtctgccgttaacgctgatgaccctggatgactgggcgctggcgacaattagcgggccggacagcgaaaaatatctgcaggggcagattaccgccgatgtgagtcatctcaccgatgcccagcatctgcttgccgcccactgtgatgccaaaggcaagatgtggagcaacctgcgcgtattccgtcgcgagggcggcttcgcgtggattgagcgccgcagcctgcgcgacgcgcagctgaccgagctgaaaaaatatgccgtcttctccaaagtcaccattgccgccaacgacgatctggttctgctgggagtagccggcttccaggcgcgcgccgcgctggcgccgctgttcgccgccttgcccgacgctgccaccccggtggtcagcgaaggcgccaccagcctgctgtggtttgaacacccgggcgagcgcttcctgctggtgaccgatgtcgacaccgccaaccgcgtcaccgacgcgttgcgcggcgaagcgcagtttaacaacagccaacagtggctggcgctgaatattgaagccggcctgccggttatcgacagcgctaacagcgggcagttcattccgcaggccaccaacctgcaggcgctgggcggcatcagcttcaaaaaaggctgctacaccggccaggaaatggtcgcgagggcgaaattccgcggcgccaataagcgcgcgctgtggacgctgtcagggaccgccagccgggtgccggaagccggggaagacctggagctgaagatgggcgacaactggcgccgcaccggtacggtgctggcagccgtacagctggatgacggaagcctgatggtccaggtagtgatgaataacgacatggaaccggacagcgtgttccgtgtacgcgacgatgccggcagcctgagcatcaaaccattgccgtattcgctggaagaaaattaaggaaaagttcccggcttgcggcgcttgcgccttagccgggctacccggccgcagaatatcgtagccacggtaagcgtagcgccaccgtggaatttccaggccgtagagtattgtagccacggtaagcgcagcgccaccgtgggatgtttatcaggactggccgatgtaaagataaatcgccaggaagtgacacacgctgccgccgagcacgaagccgtgccagatagcgtggttataaggaatacgtttgcagacgtagaagatgacccccagcgagtacaccaccccgccaaccgccagcagcgttaccccgcccaccgccagcttcaccgccagctgatagaccacgataagcgacagccaccccatggtcagataggtcaccagcgacaaaattttaaagcggtgcgcgatggtcagcttaaacaggatccccagcagcgccaggctccagatgacgatcatcagccccttcgccagcggtgaattcaaccccaccagcaaaaacggcgtgtaggtcccggcaatcagcaaatagatggcgcagtggtcgaatttcttcagccactgtttcgcccgctgatgcgggatcgcgtgatagagcgtggaagcgaggaacagcataatcatgctgccgccgtacaggctgtagctggcgatcgccgtcgcgctggcgtttgtatctgccgcctgcaccagcagcaacacaaggccgacgataccgaacaccagcccgatcccgtggctgatgctgttggcaacttcctctgccagagaatatccctgagtgattaatggtttgcgaaccatactggactccgtgaaaacaagaacgctttcattgcccacttagggtaactgagaatgattccagtgaacacctgttagctaaaataaaacgatgtatatttgtaaatactttaaaatcataaagttacatttttatttcaactcacagctgttcctgattatcttaaagcgctttgaattcaatgacataaaactggctctcgccaggatagatgtcgctgatgacctgccgcagctgcccgagagtcatattctcctgttgcgcatgctgttcggtcagcgtatcgagcgtcaccgtcgaggtcgcggtcacggcaatggtgcaaaaatagccgtcatcttcatagcgcccaacgcgcagcacatcgccgggcttaaagtgcgactccgctgcatcgcgaatggtgatggttttgcgcccggcgaggatgtcgtcctgaaaacgctgaaaaaaggtaatgtcattggcctgcatgatataattccgtcctggtcattatgaattgtgagttcgccctgtgagtatgttctcccacgccgctgtcgccagtctcaataatcttgagatgatggtctaccactacgtcattaaaaatcgtgacaaagtgatgtacatgaccatccgcgaactggccgaggccgccggggtctccacgaccaccgtgttacgcttctgccgcaaactgcagtgcgagggctactctgaatttcgcgtgcgctttaaattatatctcgagcagaatgagcctcaacaggcaaatatcggcgccagcgaaataatgagcttttttaaaagcgtcaataatgacgagttcgatgaattactcgagcaggccgtcgatattattctcgcctccgaacgtattatttttgtcggcgccggcacctccggcgcgctggcgaaatatggcgcacgcttcttctccaacgtcggtaaattcagcaaccatattgacgacccctattttccggtaaccaacgatatggcccgcaacgcgctggcgatcgtgctttccgtctctggcgagacggaagagatcctgcgctttgccagccagttcagtctgcatcattgcaaggtaatgtcgattaccagccatgagcattcgcggctggccaaactggctgatttcaatctctcctggcacgtgccgcagacgcgcattggcggggtctacgatattacaacgcaaattccagtgatctatattctcgaatccctcggacgtaaattagcgcgcaaaatcagctaaaaataacagcctgtttttttgatgtaacatattacctttggcggaatttgttatatcgtgacattcactttcactttgctagactcgagaacaatagttattagagagattagccaggatgaaaaaattaacccttccgaaagattttttatggggcggcgcggtcgccgcgcatcaggttgaaggcggctgggatcagggcggcaaaggccccagcatctgcgatgtgttgaccggcggggcgcacggcgtgccgcgcgaaatcacccaccaggtcgaagcgggaaaatactacccgaaccacgaagccgtcgacttctacggtcgctacaaagaagacatcaaactgttcgccgagatgggcttcaaatgcttccgcacctctatcgcctggacccgcatcttcccgcagggtgacgaaacccagccgaatgaagagggactgaagttctacgacgacatgttcgacgagctgctgaaatacaacatcgagccggtgatcactctctcccacttcgagatgcccctgcacctggtgcagcagtatggcggctggaccaaccgcaaagtggtcgatttctttgtgcgctttgccgaagtggtcttcgagcgctataagcacaaagtgaaatactggatgacctttaacgagatcaacaaccagcgcaactggcgcgcgccgctgttcggctactgctgctccggggtggtctataccgagcatgacaatccggaagagaccatgtaccaggtgctgcaccaccagttcgtggccagcgcgctggcggtgaaagcggcgcggcgcatcaacccggacatgcaggtcggctgcatgctggcgatggtcgccctctacccttactcctgcaaaccggaagatgtcatgttcgcccaggagtcgatgcgcgagcgctacgtctttaccgacgtccagctgcgcggttactacccgagctatgtgttgaatgaatgggaacgccgcggcttcaacatcaggatggaagacggcgacgcgcagatcctgcgcgaaggtacctgcgcctatctcggcttcagctactacatgaccaacgcggtgaaagccgagggcggcactggcgacgccatttccggtttcgaaggcagcgtgccgaacccgcacgtcaaagcttccgactggggctggcagattgacccggtcggcctgcgctattctctgtgtgaactgtatgagcgttatcagaagccgctgtttatcgtggaaaacggctttggcgcctacgacaaagtagaagccgacggcagcatcaacgatgactaccgcatcgactacctgcgcgcccacatcgaagagatgatcaaagcggtcacttatgacggcgtcgatctgctgggctataccccatggggctgcatcgactgcgtctccttcaccaccgggcagtacagcaaacgctacggcttcatctacgtcaacaaacacgacgatggcaccggcgatatgtcccgctcgcgcaagaagagctttaactggtacaaagaggtcatcgccagcaacggtgagaacctgtaactaaccgccctctcccggccgggggagggctaattgcttatccgccagacacttctttacagctttaccattgccaaaacccgttcgcccgttaagataagcctcgtgaatatttgaggcaatcatgattaagcgacaacgcaaagccattctttttgtcctcctggcctgtctggtagtgctaacctgcaccgcccagcggatggccgggatgcacgcgctggtcatgaacctcaccgccgacagcccgtcgctacagcaaaaccaggatcaggtcgaggcgccggtcacgccgtgcgagctcagcgccaagtcgctgatggccgttccgccgatgctgtttgaaggggcgctgttggctatcaccctgctgctggcggtgctggcggcgatcccgccgcgtatcgaacgccagtggcctccccgcgttatctccccaccccgattgcgggtgcatctgcgattatgcatcttccgtgagtgattgattctcctgacagttcaggttaattcatcacttacggagcaaacttatgtatatggtattcaggcgactactggtctgcctgctttggctatggctgcccgtcagccaggccgccgacagcggctggctgcgcgccgccgacaatcaacacgccagcgtccgcctgcgggcgcaaaccgaaagcaatggcgacactcgcctgcttttagacgtagcgctggaaaagggctggaaaacctactggcgctcgccaggggaaggcggcatcgcgccggctatcgcctggcacacgccgctggaggtgaactggcgctggccgacgccgcagcgcttcgacgtcgcgggcatttccactcagggctatcacggcgacgtcagctttccgatgacgctgcgcgggaagataccgccgacgcttagcggcgtcctgacgctctctacctgcagcaatgtctgtattctcactgactatcccttttcgctggatatgacgactccggcgggggagcgatttaattatgattttacccgcgcgatgggcacactgccgctgcgcgatggcctgacttcgcaactgaccgccagctacgtcagcggcaaactgacggtgaccgcccgccgcgatgccggctggcagcagccagcgctgtttatcgacagcatggaggatgtcgatttcggtaagccgagctttaccagccgcggcgctacgttgaccgccaccgtaccagtcaccgacagctggggcgaagcggcgccggacctgagcggcaaaacgctgtcgctggtgctggccgatagcggtcaggcgcaggaaagccaaatcgccgtcgccgccggcagcgccgcgccggggctggcgttaggctgggtgctgctgatggcgctggccggcgggcttattctcaacgtcatgccctgcgtgctgccggtgctggcgatgaagctcggctcgctggtgcaaaccgaaggtcgcgaacgcggcgcggtgcggcggcagttcctcgcctcggtgtgcgggatcgtcgtctcgttcctggcgctggcgctgatgatgaccgcgctacgcctggggaatcaggcgctcggctggggcatccagttccagaacccgtggtttatcggcgcgatggcgctggtgatggtgctgttcggcgccagtttattggggctgttcgaaatccgcctatcctccagcgccagcactttcctcgccaccaggggcggcaacggcttaatgggccatttctggcagggcgccttcgccaccctgctggcgacgccctgtaccgcgccgttcctcggtaccgccgtgtcggtggcgctggtggcgcccctgccgctgctgtggggcattttcttcgccatggggatcggcatgagcctgccgtggctgctgatcgttgcctggccgggtctggcgcaacgactgccacgcccgggccgctggatgaatcatctgcgggtggtgctggggctaatgatgcttggttcagcgctatggctggtcagcctgctgacgatccacatcggccgtacgccggtgcttaccctgctggtgattctggccatcgccctgctagtggccaccgcctggcgctaccgctggcggacggcgctacgcgcgggcgctctggccatcgtggtggcgggcgccgtcgcctttgtcgcccaacaggacggccagggcccgcgccgcgaccgggttaactggcagccgctcagcgagcaggctatcgccagcgccctggcggagcataagcgggtatttattgatgtcaccgccgactggtgcgtgacctgtaaagccaataaatacaacgtgctgctgcgcgacgacgtccagcaggcgctgttagcgccagacgtagtcgccctgcgcggcgactggagccgcccctccgctgacattagccagtttttaaccgctcgcggcagcgccgcggtgccgtttaaccagatttacggaccggaattgccgcagggacagattctgcctgcgctgttagaccgcgaacaccttctcgccaccctgtccgccgctaaaggaaaataacatgagagctatcaccgccttattactgctgtgcgtatcggccttcagcttcgccgccccggcggaagaaccacaatcgaacggtaatgaccagttagcccagctgctgtttaacgatccgaatagcccgcgcaccggcgcgaaagagccaaaactcacaatcgtctcgtttaccgattacaactgcccttactgcaaacagtttgatccgctgctggaaaaaatcgtccacgataatccggacatccagctcatcgttaagctgctgccgtttaaagggcagagttcggtgaatgccgctaaaaccgcgctctccacctggcgtcagcagcccgataaattctgggcgctgcatcagcggctgatggcgaaaaaaggctatcacgatgacgccagtatcgccgccgcgcagaagaaaaccgccaccgatagtgtaaaaatcgatgacaagaccatggattcgctgaagatgaacctgattttgtcgcaggtgctgaatattcagggcaccccggcgaccatcatcggcgatcagatggtggccggcgcgatccctgctgatgagctggaggggctggtgaaagagcagctggcgaaagcccgtggccagtaaaatcaggcgctggctgcgcgagctggcggtgtggctgctgattggcgcggcggtgagcctggcggtggattattttcgccagcccgcgctgccgcaaaacgtcagcgccacatcgctgcagacactcgacggcaggacgctggatctgcatgccatgagccagcaaaagccgctgctgctgtacgtctgggcgacctggtgcggagtttgtcgctataccacgccgtcggtggcatcgcttgccgcggacagcggcaatgtgctgacggtagccctgcgttccggcgataacgtcacgctggagaagtggctgaccaggaagaaactggcgctgccgacggtgaatgatccaagcggccagctggcgcggcagtgggatatccaggtaacgccaacgctggtggtcatttctcaaggcgaggtaaagtcggttaccaccggctggaccagcggctggggaatgcgcctgcggctgtggctggcctcctggtaggccgccgggctttagcggtttttatgccgggtaaggcgtatccgccacccggcctaccattcggctttgaccccgtagggccggcaagcgcagcgccgccgggcaatagacatctacgggttatttcccgcccgccagttcaaggaagctacccgtcacatacgacgctttgtcgctcagcagccaggcaatggcctgagcgacctcttccggcaggccgccgcgctgcatcggtagcgaacctttcactcgatccacgcgtcccggctcaccgccggaggcgtgcatctcggtataaatcagccccggacgcacgccgttgacccggatcccctgcgccgccacctccagcgccagcccggtggtcagggtatctaccgcccctttcgacgcggcatagtcaacgtactcccccggcgcgccaaggcgcgaggccgccgacgacacgttaactatcgccccgcccttgccgccatgccgatgtgacatacgctttaccgcctcacgacagcagaggaagtaaccggtgacgttggtggccagcacgcggttaatacgctcggcgctcaggctctccaccgtacactgggtaaacaggatcccggcgttgttgaccagcgccgtcagcggctcgcccatgcggtcgatcgcctcaaacatcgccatcacctgcgcttcatcgctgatgtccgcccgcagcgccgtggctttgccgccagacgccacaatggtattcaccacctcggtggcggcgttaatgttgtgatggtaattgaccgccacggtatacccttcctgcgccagcagcagcgccgtcgcccggcctatgccgcggctcgcgccgctaataagagctattcccataccttccctccaaaaaaataaaggcgccgcagcgcctttaaaagtttagctaaaacgcaaacttactggtattcgctcatcggcacgcaggagcagaacaggttgcggtcgccgtagacatcatccagacgtttcaccgtcggccagtacttgttgtgcaacccagccgggaataccgccagctcgcggctgtacggatggttccactcgcccaccagctcgccctgggtgtgcggcgcgttcaccagagggttatcctccaacggccattcgccggctttgacgcggtcgatttccgcgcggatcgccagcatcgcgtcgataaagcggtccagctcgaccttgctttccgattccgtcggctcaaccatcagcgtccccgctaccgggaaagacatggtcggggcatggaagccaaagtcgatcaggcgcttggcgatatccagctcgctaatgccggtctcttctttcagcggacgaatatcgagaatacattcgtgcgctacgcgaccatcgcgaccggtgtagagcaccgggtaggcgtctttcagccgggtagcgatgtagttggcgttaaggatcgcgttctggctcgcctgcttcagcccttccgcgcccatcatgcggatatacatccagctgatcggcaaaatggacgcgctgccgaacggcgcggcggaaaccgcgccctggcgggtcagcataccttcaatctgtaccacgctgtggcccggcacgaacggcgccaggtgcgctttcacgccgattgggcccatgcccgggccgccgccgccgtgcggaatgcagaacgttttatgcaggttgaggtgcgaaacgtcggcgccgataaagcccggagaggtgatcccgacctgggcgttcatgttggcgccgtcgagataaacctggccgccaaactggtgcacgatctcgcacacttcgcgaatggtctcttcatacacgccgtgggtcgacggataggtgaccatgatgcaggagagattggcccccgcctgctctgctttttcacgcagatcggcgagatcgatgttgccgtttttatcacaggcaacgaccactacctgcatacccgccatctgcgcggaagccgggttggtgccgtgcgcggagctagggatcaggcagatatcgcgatggccttcgttgcggctctcgtgataatggcgaatcgccagcagaccagcatattcaccctgcgcgccggagttcggctgcatgcagacggcgtcatagccggtcagtttcaccagccagtcggaaagctgggcgatcatctgctgatacccttccgcctgctcgaccgggcagaacgggtgcagctcggcgaattccggccaggtgatcgggatcatctccgccgcggcgttcagtttcatggtgcaggagcccagcgggatcatcgcctggttcagcgccagatctttacgctccagggcgtgcatgtagcgcatcatctcggtttcgctatggtagcggttaaacaccggatgggtgaggatcgcatcgtcgcgcagcatcgccgccgggatcgaacggctatccagcgccacgtctttatccagggtatcgatatccagaccgtgatcgtcgccgacgatggcgcggaacaggttcagcacatcttcgcgggtggtcgcttcatcgagcgtaatgcccaccgcgccgtgaatatcgctgcgcaggttaatctgcagggcttcggcacgcgccagcaccgcggctttatctgccacttcgacgcacagggtgtcgaagtagtgggcatggcgcagcttcagccctttcttctgcaggccgtcggccagaatgtcggtcagacgatgaatgcggccagcgatacgtttcagacccgccgggccgtggaataccgcgtacaggctggcgatgttggccagcagcacctgcgaggtacaaatgttggagttcgctttctcacggcggatgtgctgctcgcgagtctgcatcgccatgcgcagcgcggtattccccgccgcatctttcgatacgccgataatccggcccggcatggagcgtttgaattcatctttcgccgcgaagaaggctgcgtgcgggccgccgtagcccatcggcacgccgaagcgttgggcggaaccgaaaacgatatccgcgccctgcttgcccggcgccgtcagcagcaccagcgccataaagtcggcagcgacactgacaatcactttgcgcgctttcagctcggcgatcagtttgctgtaatcgtggatttcgccggtggtgcctacctgctgcagcagcacgccgaagacatcctggtgatcgagcactttgtcggcgtcatcgacgatgacgtcgaaaccgaaggtttccgcgcgggtgcgcaccacgtccagggtttgcggatggacgtcggcggcaacgaagaagcggttggcgctcttcagtttactgacgcgtttggccatcgccatcgcttcggcggcggcggtcgcttcatcgagcagcgaagcggaagcgatatccaacccggtcagatccagagtgacctgctggaagttgagcagcgattccagacggccctgggatacttccggctggtaaggggtataggcggtataccagcccgggttttccagcatgttgcgctgaatgaccggcggcagctgcacggcggtatagcccatgccgatgtaagacttgaagcgcttgttgcgactggcaatcgccttcagctccgccagcgcggcgaattcggtagtcgcgtcgcccacctgcggtggggtcgccagctggatatcctgcggcacaatctggccgatcagggcgttaagcgaatccgcgccgacggtcttcagcatctcttgctgctgctgagcgtccgggccaatgtgacgttcaataaaggcgtcgcggttttcaagctgacttaaagtctgagtcatgagcgatggttcctgaaacgtgcggtgaatcgtggttgtctgactggtttgcccggcaagcgctgatgcttaccgggccagaatacgcaaaatcattcgcgttgcaggaaggcggcgacacagcgactccccgggagcttacaaaagtaagtgaccggggggagccaggaagccaacgcccctgcagcgtgaaggatgaagcgtatttattcgtcttccagtaaagcttcatacgcggcggcatccagcagcgcggcaacctgcgcttcgtcgctggctttgatcttgaagatccagccgtcggtatacgggtcgctgttgaccagttccggagagtcgttcagctcttcgttgacggcaacgatttcaccgctaatcggcgcgtagatatcggaggccgccttcacggattcggcaaccgcgcaatcggcgcccgcttcaacggtggcgcccacttccggcaggtcaacgaaaaccatatcgccaagcagctcctgcgcgtgctcggtgatccctacggtataggtgccgtccgcttctttacgcagccactcgtgttctttgctgtatttcagttctgctggtacgttgctcatcaattcatctccaaaaaagggaaatcacacaatggctttgccattgcgtacaaaaccaggtttagtcacttttaccggcatttcacggttacggatttgcaccaccgcggtgtcgccaatcccggccggcacgcgagccagcgcgatgctgtagcccagcgtcggcgagaaggtgccgctggtgataatgccttctttttgattaccgtcgctatcggtaaaacggaccggcagaccaccgcgcaggacgcctttctcggtcatcaccaggccaaccagctgctcggtgcctttttcgcgctgcatctccagcgcttcgcggccgatgaagttacgatcggcgggctcccaggcgatagtccagcccatgttcgccgccagcggggaaacgccttcgtccatctcctggccgtacaggttcatcccggcctccaggcgcagggtgtcgcgcgccccaagaccgcacggcttaacgccagcgtccagcagaccgcgccagaaatcagccgcctgctcgttcggcatcgcaatttcataacccgcttcgccggtatagccggtggtggcgataaacaggtcgccggcctgcacgccgaagaacggcttcatgccttccacggcctgacgctgagcgtcggtaaacagcgtcgccgccttcgctttcgcctgggggccctgcaccgcgatcagcgacagatcgtcgcgaacggtaatttcaaggccgtaaggttcagcttgttcggagatccaggcgaggtctttttcgcgggtggcggagttaacaacgaggcggaaataatcttcagaaaggaaatagacaatcaggtcgtcgatgacgccggcggaggcggtcagcattccggtgtagagcgctttgcctggggtggtgagcttcgccacatcgttggccagcaaatagcgcaagaactcgcggatccggctgccgtggaaatcgacgatggtcatatgcgacacatcgaacatccctgcatcgccgcgcaccgcatggtgctcatcaatctgggacccgtaatgcagcggcatcatccagccatggaaatccaccatgcgcgcgccgcacagcgtgtgttgttcatacaacggagtctgttgagccatcttttcctcatcgaataaaacggaaccagccacgaaattgtcggcgattttgcgccacgaaattcggcgtcggcatcgctgacggacgccgacgcaaacgttctctttggcctgaacttaccaccgaacccggcgctaaaccataagctcattcagggcatcacattagcttatggctaaaatccgccgaaaagcctacagagttattgactggaaaaaagcgatttacgccacataaaattaacattaacggcgcgacaattaggtaatgatggtgttttatgcgattttacggctctaatttctttaacaaaaaaaaggacgcattaataaatctaatgcgaaaaaagaggtgaaattagaatatttcaaatgagggggaaaacccggcgcccaggccgggtgaaagaagtgtgacgcggttaacgtaaccaggcaggcagatcgttgaggcccatcgcctggcgaatcagctgcggtttcacgccaggcagcgtatcggccagtttgagtcccacatcgcgaagaaatttcttcgccggatg

SEQ ID NO: 5339 - DNA, 250593 bp, Unknown
  gut microbiota DNA sequence
caaacctttaaatatcagaagaatattcgcatccacgccttcaatgaagaggggatggagccctatccgcacggctgggacgtctggagccatgggatccgcgcttttatgagcgaaaaagggatcgagccgaaccggatctatacctcggaagaggccgatgcgccgcagtaccttgaacatctggggatcgagacggtgcttatcgatcctaagcggacctttatgaatattagcggcgggcagatccgcgagaacccgttccgctactgggaatatattccgacggaagtgaaaccgttctttgtgcggacggtggcgatcctcggcggcgagtcgagcggtaaatcgacgctggtcaataaactcgccaatatcttcaataccaccagcgcctgggaatatggccgggattatgttttttcgcatctcggcggcgatgagatggcgctccagtattcggattacgataaaattgcccttgggcatgcgcagtatattgattttgcggtgaaatatgccaacaaggtggcgttcatcgataccgacttcgtcagcactcaggccttctgtctgaagtacgagggacgtgagcacccgtttgtgcaggcgctgattgatgaataccgcttcgacctggtgatcctgctggagaacaataccccgtgggtggccgatggactgcgcagtcttgggagctcggtggatcgtaaagagtttcagtcgttgctggtatcgctgctgaaagagaacgagatcgaattcgttcatgtgaaggagtcggactacgatgcccggttcctgcgctgcgtcgagctggtgaaacagctgatgggcgagcaggggtaggggctctgcgggctgttgccctcaccccaaccctctcccaatgggagagggagcaaacattaaaaaaggcaacttgcgttgcctttttgcgttttatttcgcgatacgtttgtacttgattcgcttcggttccagcgcgtcggcgccgagagtgcgtttcttgtactcttcgtactcggtaaagttaccttcgaagaactcaaccttaccttcatcctggtaatccagaatgtgggtggcaatacggtcaaggaaccagcggtcgtgcgagataaccatcgcgcagcccgggaactccagcagggcgttttccagcgcgcgcagggtttcgatatccaggtcgttggttggttcatcgagcagcaggacgttaccgccgacctgcagcagtttcgccaggtgcagacgaccacgttcaccgccggacagctcgccaacgcgtttaccctggtcgacgcctttgaagttaaagcggcccacgtaggcgcggctcggcatctcggtgttgccgatcttcatgatatccaggccgccagacacttcttcccacacggtcttactgttgtccatcgcgtcgcggaactgatcgacggaagccagcttaacggtttcacccagggtgatggtgccggaatcaggctgttcctggccggacatcatgcggaagagggtggatttacccgcgccgttcggaccgatgatgccgacgatagcgcctttcggtaccgagaagctcagatcgtcaatcagaacgcggtcgccgtaggatttgcgcagatggctgacttccagaactttatcgcccagacgcgggcctggcggaatgaacagttcgttagtctcgttacgtttctgatattcaacgttgttaagctcttcaaagcgcgccaggcgggctttgcccttagactgacggcctttcgcgccctggcgaacccactcgagttctttctcgatagatttgcggcgtgcggcttcctgagaagcttcctgcgccagacgctggtctttctgctccagccaggaggagtagttgccttcccacggaataccttcgccgcggtcaagctcgaggatccagccggcgacgttatcaaggaagtaacggtcgtgggtaatcgccaccacggtgccttcgaagtcgtgcaggaagcgttccagccaggcgacggactcggcgtcgaggtggttggtcggttcgtcgagcagcagcatatccggtttttccagcagcagacggcacagcgcgacgcggcggcgttcaccaccggaaagattagcgattttcgcatcccagtccggcaggcgcagggcgtcggccgcgcgctccagctggacgttcaggttgtggccgtcgtgcgcctggataatctcttcgaacttgccttgctgtgcggcaagcttatcgaagtccgcatccggctcggcgtatttggcatagacttcgtccagccccttcagcgcgttaaccacttcggcgaccgcttcttccacggactcgcgcacggtgtgctccgggttgagctgcggctcctgcggcaggtagccgattttgatgccgggctgcggacgcgcttcaccttcgatctcggtgtcgataccggccatgatgcgcagcagggtagatttaccggcgccgttcagaccgagcacaccgattttcgcgccagggaaaaagctgagggagatatttttcaaaatatgacgtttcggcggaaccactttgccgacacgatgcatggtataaacgaattgagccacgttggacttcgcctctttctattttgatagatagttcaaagccgaagtgtagcctttttcgcgcgctaatcccagcgaggcgacaggattcacagaagcgtaaaaaaatgtccaggacatggcgcgtttagcgttgtctgattagcataagtaaagccgcctgccgaaccggcaggggtttttaagcggcacgatgctgcgaaaatgcaccggaaagaggaagagcttgtggaaaaagccaaaaaaatgacgtggcatcttttggctgccagcgttggtttgttgacgttgagtcagctggcgcatgcggattcactggatgaacagcgcagccgctacgcacaaattaagcaggcgtgggataaccggcagatggatgtagtcgaccagctgatgcccacgttaagcacctatcccctgtatccctatttgcagtaccgacagatcaccgacgatctgatgaaccagccggcgctggtggtgaaaaactttattgacgccaatccgacgctgccccctgcgcgttcattacgttcgcgcttcgtgaatgaactggcccggcgcagcgactggcgcggcttgctggcgtttagcccggataagccgaccagcaccgaggcgcagtgcaactattactacgccaagctgagcgtggggcagtcgcaggaggcctggagcggggcgaaagagctgtggctgacgggcaagaatcagcccggcgcctgtgaaccgctgttcagcgcctggcgcgactccggtcagcaggatccgctggcctatctcgaacggatccgcctggcgatgaaggccggcaatatcgggctggtgaaatcgctggcccagcaaatgcccgccaactaccagagcatcgccagcgccgtggtcgccctggctaacgatccaaacagcgtcctcaccttcgcccgcaccaccggggcgacggactttacccgtcagatggccgccgtcgccttcgccagcgtcgcccgccaggacgtggaaaatgcccgcctgatgatcccttcgctggtacaggctcagcagctcaatgaggatcagacccaggaactgcgcgatattgtcgcctggcgcctgatgggtagcgatgtaaccgaagagcaggccatctggcgcgatgacgcaatcatgcgttcgcagtccacgccgctggtggagcggcgggtacggatggcgttggggacgggcgatcgccatggcctcaacacctggctggcgcgtctgccgatggaggcgaaagagaaagacgaatggcgctactggcaggcggatctgctgctggagcgcggcagggatgaggaggcgcaggcgatccttcgctcgttgatgcaacagcgaggcttctacccgatggtcgccgcgcagcgtcttggcgaggagtataccttccgcatcgataaagcctcgggcaccatcgatccggcgctggcctccgggccggagatggcgcgggtacgtgagctgatgtactggaatatggataacaccgcgcgcaccgaatgggccaacctggtcactagtcgcaccaaatcccagcaggcgcagctggcgcgctatgccttcgatcagcactggtgggatctgagcgtgcaggcgacgatcgccggtaagctgtgggatcagctggaagaacgtttcccgctggcctataacgacctgtttgcccgctatgttagcggcaaagatattccgcagagctacgcgatggcgattgcccgtcaggagagcgcctggaacccgaaagtgcgctcgccggtcggcgccagcggactgatgcagattatgccgggcaccgcgacgcataccgtcagtatgttcagcattcccggctacagcggcccgtcgcagctgttggatccggaaaccaacatcaacatcggcaccagctatctgcagtacgtttatcagcagttcggcaataaccgtatctacgcctcagcggcctataacgccgggccgggccgggtacgcagctggcaggggaacagcgccggacggatcgacgccgtggcgtttgtcgagagtattccgttttcggaaacccgtggctacgtgaagaatgtcctctcctatgacgcctactaccgctactttatggggcagcaggataagatcctcagcgatgcggagtggcgccagcgttactgatcgccgggaagtatgttatgctttgtactcgttgaagagtacattcgacgggcagcgtaagctgcccgtctcaatatggtggcgcgatatgacccaacaatctccctattccgcggccgttgccgaacaacgtcatcaggagtggctgcgctttgttgccctgcttcagcaggcctatgctgaggatctgcatctgccgttgctgcagctgatgctgacgcccgacgagcgcgaagccctgggtacccgggtgcgcattatcgaagagttgctgcgcggcgagatgagccagcgtgagctgaaaaatgagctcggcgccggaattgcgaccattacccgcgggtcgaacagcctgaaatcggcgccggtagagctgcgccagtggctggagcagacgctgctggctagcgataaatagcgttatggaacgggcttagcgccagcacaaccgcctggtggtaaacgctgctgcgggttaatctgccgccggtgaaaaccccaatcgccccctctttacgaccgatctgatcgatgccggtatactgcgacatgaccgggccgagggcttcgccagcgcgaacctgctcaagaataacgtcaggcaacggcagcgtggctgagcgcgcttctccgcgctggctggcgctttcgatgaccacccagctaaaggtgctgtcatcgtcgataccggcttcgatggctacccagaaatcggcatttggctgggcaaggcgcgcattggcgacgcgatttcgtgcgccagcgcgcgtttcctcgctgccgaagggctgttccggcacgccgctctcgacggcgacggactcaatgtggcaggatccttcgccgaaaatctcgtcaaaagcctgcagaattgcctgaattttggcgggattagtggtcgctgagacaacatggtgcataatcaaaacaactcagaataaactaacgtcatcgcagtatactctaaatcaccccgagggcaggcggtaatgcccgaaagcggttgataacgagtccagaacggaaaaaaagcatgttacaagtataccttgttcgccacggtgaaacgcagtggaacgccgagcgacgtattcagggtcagtccgacagcccgctgaccgcccatggtgagcgccaggcctggcaggttggcgagcgcgccagaacgctggggatcacccatattattaccagcgatctgggacgaacccgccgcacagcagagattatcgccgaagcctgcggctgcagcgtgatcgccgatgcgcgcctgcgcgaactggatatgggggtgctggagaagcgccatatcgactcgctcagcgaagaagaagaaggctggcgtcgccagctggtcaacggcacaccggacggtcgtattccgcagggcgaatcgatgcaggagctcagcgagcgtatgcatgcggcgctggcatcctgtctggaattacccgccggtagccggccgctgctggtgagtcatgggatcgcgctgggctgcctggtgagcacgatattagggctgccggcgtacgctgagcgtcgtctgcggctgcgcaactgctctatttcgcgcgtcgactatcagcaaagcccgtggctggcttccggctgggtggtggaaacggcgggcgacgtctcgcatcttgacgcccccgcaatggacgagctgcagcgttaacggcggatcgggatcagatactcgcagcgcaactgaatcggcgtggcctgatcccggctttcatcttcagggtagaagcgttcaatatccagccccttgcgacgcgtcaggttcagcatcggcatgcaggtgccgtagacggtcaggatgaattcctgcagaccggtacccagcccttcatacgtaaacatgacatactcgccgccctccagggtcactggatgggcatgctgcaggtggccgttagccatctccggcgtcagcgcggtggtatagaatacttcctgctcatcgtctttttccaggctcggacgtggctcatgcagcccgtagagcaccggggggattgacggtgagttgccgaggaagtctcgccagaactggacccgcatctggttacgaaaatcggagatttcctcgagcttacaggtatagctctgggtcacgccaagcagctgagtagggggcagagtgataaactcatgtttcggcagggtaaattcgccaagacgcagcggcgggcgcataccgaacgaactccagtccggcgagcggcggtagagcgccggcgtcagcgagaattgtttcttaaacgctcgggtgaaggtctgctgggagtcgaaacggtactgcagcgcaatatcaaggattggacgggcggtcaggcgtaatgcgacagcagatttcgacaagcggcgcgcgcgaatataggcaccgatggcatggccggtgacatccttaaacattcgctgcaaatgccacttggaataacctgccttcgccgccacattatccagagaaagcggctgatccaggtgaccttccagccagctaaggagatcgcgaataatccctgcttgatccataaaatgtccccatccttaaacacaggtgcctgatattaaagtagcggataatagcattttttgatgttttagcattcagtgttttttttgcttttaaatgcggtaggtcaggggatttgaacgataattttgtaaagctgtgatctataaaccttttctgctaagtgcgtgataatcactcagctatattttttaataatggtaacaatatgaaatacaagaagtttgcgatggggctgctcctgctggccggtagccagctggctcaggcggagcagattggttccgtggatacggtcttcaaatggttagggccggatcacaaaatcgtcgtcgaagcctttgacgatccggatgtacagaacgtgacctgctatatcagccgggcgaaaaccggtggcatcaaaggcgggctggggctggcggaagatacctctgacgcggcgatttcctgccagcaggtcgggccgattgagctaacggacaaaatcaaaaacggtaaaagccagggcgacgtggtgttccagaagcgcacctcgctggtgtttaaaaaactgcaggtcgtgcgtttctatgatgcgaagcgcaatgcgctggtctatctgacctactcggataaagtggttgatggctcgccgaagaacgccatcagcgccgtgccgatcatgccatggaataaataaacgggagtgcgcatgcagcagccacggatttggttagttgaggatgaacagagtatcgctgataccctggtttacatgctgcagcaggagggcttccaggtcagcgtctttggccgcggtttgcccgcgctggaggcggcggcgcatcaggcgccagatgtcgccatcctcgacgtcggcttgccggatatcagcggcttcgagctctgtcggcgtctgctgacgcgttatccggcgctgccggtgctgtttttgacggcgcgtagcgacgaggtcgataagctgctggggctggaaatcggcgctgacgattatatcgccaagccgttttcaccacgcgaagtctgcgcgcgggtgcgaaccgtgctgcggcggctgcagaagtttgccgcgccatcgccggtggtacgcgtcggcgaatttgcgctcgatgagcaggcggcggcgatcagctggttcggccagccgctgaatctgacgcgctacgaatttctgctgttgaaaaccctgcttcacgcgcccggtcgcgtcttctcccgtcagcagctgatggagctggtgtggagcgatgcctgggaaagcctcgaccgtaccgtcgatacccatatcaaaaccctgcgcgctaagctgcgggctgtgaatcctgaaaaggcgccaatcaatacccatcgcggtatgggctacagcctggggcgcggctgatgcgcatcggcatgcgcctgctgctgggctattttcttatcgtcgcgatcgccgcgtggtttgtgctgtcgatctttgtccaggaagtgaagccgggcgtgcgccgggcgacagaggggaccctcaatgataccgctaccctgttggcggcgctggcgcgtgaggatctgctggcggcaaacccgcagcagggcaggctggcgcaggcctttcaccagctcaaccagcagccgctcaacgccaatattggcggaattaaaaaggtacgtaatgagtaccgcgtctatctgaccgatgcccggggcaaggtggtgtttgactccagcgggcaggcgacagggcaggactattcgcgctggaacgatgtctggctcaccctgcgcggccagtacggcgcgcgcagtacgcgcagcgatccgcatgatgaagccagctcggtgatgtatattgccgcgccggtgatggataaggggcggattatcggcgtgctgagcgtcggtaaacccaacctggcgatgacgccggtcattaagcgcagcgagcggcggatcctctgggccggcggcgccctgctgggcattgcgctgttgattggcggcggcgtcgtctggtggatcaatttctctatcggcaagctggtgcgctatgcggactcggtgaccgctgagcgcccgctgccgctgccggaggttggcagcagcgaattgcgcaagctggcccaggctctggagagcatgcgggtaaagctcgaaggtaagaatgccatcgaaaactatgtctatgacctgacccatgaactgaaaagcccgctggcggccatccgcggcgcggcggagatcctgcgcgaagggccgccgcctgaggtggcggcgcggtttactgataatatcctcgcgcaaaacacccggatgcaactgctggtggagcggctgctccagcaggcgagactggaaagccggctggagataaagcagcatccggtgtcgatagatgcgctataccaacggctgacggaggagcgcaacatcgctctggcggcgaaagctatcaccctgcgctggcgggagagtgggatgctggtcaatggcgatggcgagctgctggcccaggcgctgggtaatctgctcgacaacgcgattgactttaccccccagggcggtgagatcgccctggctgcggagaagcgaaatgaagaggtgcaattgagcgttatcgacaacgggtgcggtattccggactatgccctggaacgaatctttgagcgattctattcgctgccgcgcgaagacggccataagagcagcggccttgggctggcgttcgttcgtgaagtcgcgcgcctgcatcacggcgatatcaatctgcacaatcggcccgaaggcggcgtggtcgccacgctgcgacttcaccgtcccttcacatagcttcaaattctccccacacagccgtcctattgtgaggccatcacgatagggagaaaggctatgttgaaatcaccgttattctggaaaatcaccacgttaataggctgtattgtgctgctatctttgccgttaatgatggtcagggagcttattaatgagcgagcggattatcgtagcgaagtggtggacgccattgagcaaagcaccagcggctcgcaaaaactcgccggaccgctgatcgctattccgataaccgagaccctgacccgcatggagaaccaaaaagaggtcaactatcagcggagctgggtgtattactggctgccggagtcgctggcggtcatcggcaaacagaccgtggagtcgaggagggtgggcatctacagcggccaggtctggcataacgccttgcagattaaggcctcgtttgatccgctgcgtctggcggcgttgagaaaaacgaatatcgtcttaggccagccgcggctggtggtgagcgtcggcgatgcccgcggcattggtgccatccatgccccggaggtcaacggtaacgtattaagcgtggagccggggctggggataagcggcgatggcgcaggtattcatatgccaatgcctgcgctggcggaggacaacaagccgcttgagattgccttttcactcgatctgaacgggacgggagagttttcactggtgccgctcgggcgtaacagcgagctgcagctgaccagtaactggccgcatcccggttttctcggcagcttcctgccaacgcaacgggaagtgagtgctgccggctatcgcgcccactggcaaagcagctggttcgccaacgatatggggagctatttcaaggatgatatggagatcccgtggtcgcgactgccggcgttcagtgccgatgtgatgtcccttgccgaccagtaccagctaaccgatcgggcgacaaaatatgccatcctgttaatcgggctgacctttatggcttttttcgtgttcgagagcctgacccgtcgtcccctgcatccgatgcaatatctgctggtgggcttatcgctggtgctgttttacctggtgctgctggcgctctcagagcacattggttttaccgccgcctggctggcggccagcctgtctggcgcggtgatgaatgggatctaccttcaggcagtgctcagaggatggcgtaacagcctgctgtttgtcgccgcgctactgctgctggatggcgtgatgtggtttctgttgcattctgaggatagcgcgctgctgctgggtaccggggtgctggcgctggcgctgagcgtcctgatgtttttgacccgtcgcgtggactggtatgcgttatcgctgccgaaaggcacagtgcctccgacaccggctgccgatgacgataagctgcgtctctggaaagagtgacggcataaaaaacggcgcccctggggcgccgttttcgcatcatggctgcggaataaatcgtattattcctgcagatcgccacagaaacggtagccttcaccgtgaatggtagcgatgatttccggagtatccggagtggattcgaagtgtttacgaatccgacgaatggtcacgtcaacggtacggtcatgcggcttcagctcgcgaccggtcattttcttcagcagctcggcacgagactgaattttgcccgggttttcgcagaagtgcagcatcgcgcggaattcactgcgcggcagcttgtactgttcgccgttcgggctaaccagggaacggctgttgatatcgagttcccagccgttgaacttgtagctttccacgctgcgacgctcttcgctcacggtaccgaggttcatggtacgggagagcaggttgcgcgcgcggatagtcagttcacgcgggttaaacggtttagtgatatagtcgtcagcgccgatttcgaggccaaggatcttatccacttcgttgtcgcggccggttaagaacatcagcgcgacgtctgcctgctcgcgcagctcgcgcgccagcagaagaccatttttacccggcaggttgatatccatgatcaccaggttgatatcattttcagacaggatctgatgcatttccgcgccatcggtcgcttcgaatacatcgtaaccttctgcttcgaaaatactttttaacgtgttgcgtgttaccaactcgtcttcaacgataagaatgtgcggggtctgcatgtttgctacctaaattgccaactaaatcgaaacaggaagtaccaaagtccctgacctgcctgctgcatgtcgcaaattaacatgcgcggcgtaacatgactaaagtacgtaattgcgttcttgatgcactttccatcaacgtcaacaacatcattagcttggtcgtgggtactttccctctggacccgacggtgtcaaaaacggctgacatcctaaccattttaacagcaacataacaggctaagagaggccgaacacccaataaaactacgcttcgttgacatatatcaagttcaattgtagcacgttaacagtcttgtgaaatcattgcatcgccatgctctttatagtcacaatctttaccaggctcaactagttgcgtggataaattaataaatacagtgaatccaaagcctgaaacgatgcatcagatgaaattgcattgcccatcatatggataaatgggttctgttaacatactccttgtcacggcctcctgagaacagtttagatttttttataggtaagaaaacgcaattttagtgatttttgttgcaaatttgtaaattttcaccgcgtaaaatggggggcgctgcgcctcgataacgcctgagagagagaaagaaaccgcaatgcgtttaacgattattttagtcggtcctgcccgggccgagaacgtcggcgctgccgccagggcgatgaaaaccatgggatttcgcgaactacggatcgtcgatagcgaagcccacctggcgccgccggcacgctgggtggcgcatggctcaggcgacatcctcgatggtatcaccacctatcccacccttgccgaggcgctgcatgacgttgattttaccgtcgccaccaccgcccgcagccgcgcgcgttttcactattacgccacgccgcagcagctgttgccgctgctggaggagaaggcgcagtggatgaaccatactgccctggtatttggtcgtgaggacgccggattgaccaatgaggagctggcgctggctgatgtgttgaccggtgtgccgatggctgcggattatccgtcgctgaatctcggccagtcggtgatggtctactgttatcaattagcatcgctaatgcaacaaacggcgcccgccgccgctgcggcagaccatcatcagctgcaggccttacgtactcgtaccctggcgttactttcgcgtttgggcgttgaggatgatgccaaactggccgactggttgtcgcaacggctgggcctgctgcagcagcgcgacacggcaatgttgcatcgtttgctgcatgatattgaaaaaaacctgccagaataaaactctgccatattttttatttatggatgtgtatgctgttctatgagctggttttccgctgatctggatgttttttctcacggcagcgggaaaatacgtaagcctgctgaaatggggcaaattgagaaattcattgacttaagacggcagatactttaaccaatataggcaggacatacagacagataaaaatacagagtacacaacatccatgaatcgcatcggcatgattaccaccattatcaccaccaccattaccacaggtaacggtgcgggctgacgcgtacaggaaacacagaaaaaagcccgcacctgaacagtgcgggctttttttttgacaagagatcaaggggtaagaaccatgcgagtgttgaagttcggcggtacatcagtggcaaatgcggaacggtttctgcgggttgccgatattctggagagtaatgccaggcaggggcaggtagcgacggtcctgtctgccccggcgaagatcactaaccacctggtagcgatgattgaaaagaccattggcggccaggatgccctccccaatattgccgacgccgaacgcatttttgccgaacttcttcagggccttgccgacgcccagcccgctttcccgcttgcccagttaaaagccttcgtggagcaggaatttgctcagattaagcatgttctgcacggcatcagcctgctgggtcagtgcccggacagcgtcaatgccgcgctgatctgccgcggcgaaaagctctccatcgccatcatggcgggtctgctggaagcccgtggacataaagtcagtgtcattaacccggtcgaaaaactgctcgccgtgggccactatctggaatccaccgtcgatatcgccgaatccacccgccgcattgccgccagccagatcccggcagaccatatgatcctgatggccgggtttaccgccggcaatgagaaaggcgagctggtggtgctggggcgtaacggctccgactactcggctgcggtactggccgcctgcctgcgcgctgactgctgcgaaatctggaccgatgtcgacggagtgtacacctgcgatccgcgtcaggtgccggatgcgcgcctgctgaaatcgatgtcttatcaggaggcgatggagctctcctactttggcgcgaaagtgctgcacccgcgcaccatcgcccctatcgcccagttccaaatcccatgcctgattaaaaataccggcaacccacaggcgccgggaacgcttatcggcgccagccgcgacgaggacgatttgccggtgaaaggcatctctaacctcaacaacatggcgatgttcaacgtctccgggccggggatgaaagggatggtcggcatggcggcccgcgtcttcgccaccatgtcccgcgccggcatctcggtggtgctgatcactcaatcttcttccgagtacagcatcagtttctgcgtgccgcagagcgactgcgcacgtgccaaacgggcgatggaagatgagttttatctggagctgaaagaggggctgctggagccgctggcgattatggagcgtctggcgatcatctccgtggtgggcgacggaatgcgtaccctgcgcggtatctcggcgaaattctttgcggcactggcccgcgccaatatcaatatcgtggcgattgcccagggctcttccgagcgctcaatttcggtagtggtcagcaatgacgacgccaccaccggcgtgcgcgtgacccatcagatgctgttcaacaccgaccaggtgattgaagtgtttgtcatcggcgtcggcggcgtcggcggcgcgctgctagagcagatcaagcgccagcaggggtggctgaagaacaaacatatcgatctgcgcgtctgcggtgtagccaattctcaggcgctgctgaccagcgtgcatggcctgaatctggaaaactggagtgcggaactggcggaggcgaaagagccgtttaatcttggccgcctgatccgcctggtgaaagagtaccacctgctcaatccggtgatcgtcgactgtacctccagccaggcggtcgccgatcagtatgccgacttcctgcgcgaaggtttccatgtggtgacgccgaacaaaaaggccaatacctcttcgctggattactatcaccagctgcgccatgcggccagcagctcgcggcgtaagttcctctatgacactaacgttggcgcgggcctgccggtgattgagaacctgcagaacctgctcaacgccggcgatgagctgcgccatttctccgggatcctgtccggctccctgtcgtttatcttcggcaagctggacgagggggtgagtttctccgcggcgacggcgatggcccgtgagatggggtataccgagccggatccgcgcgacgatttatccggggtggatgtggcgcgtaaactgctgattctggcccgcgagaccgggcgtgaactggagctggcggacattatcgtcgagtcggcgctgccgccggacttcgacgccagcggcgatgtcgagacctttatggcccgcctgccgtcgctggacgatggttttgcctcgcgggttgctaaggcgcgcgatgaaggtaaagtcttgcgctacgtcggtaacatcgaagaggatggtacctgccgggtaaaaatagccgcggttgacggcaacgatccgctgttcaaagttaagaatggtgagaacgcgctggctttttatagccattattatcagccattgccgctggtgctgcgcggctatggcgccgggaacgacgtcacggcggccggcgtattcgccgacctgctgcgcaccctgtcctggaagttaggagtttaagatggtcaaagtatatgccccggcttccagtgccaatatgagcgtcgggtttgatgtgttgggcgcggcggtcacgccggtcgatggcacgctgcttggcgacaacgtcactgtcgaagcggcggagcaatttagcctgcagaatcttggacgcttcgccagcaaactgccgacggcgccgcaggagaacattgtttaccagtgctgggaaagcttttgccgggagatcggcaagacggtgccggtggcgatgacgctggaaaaaaacatgccgattggctccgggctgggttccagcgcctgctcggtggtcgctgcgctggtggccatgaacgagttctgcggcaagccgctgaacgagacgcgcatgctggcgctgatgggagagatggaagggcgtatctccggcagcattcactacgacaacgtggcgccgtgctatcttggcggcatgcagttgatgatcgaagagaatgggattatcagtcagcaggtgcccgggtttgatgagtggctgtgggtgctggcctatccggggattaaagtctctactgctgaagcgcgggcgattctgccggcgcagtatcgccgccaggattgtatcgcccatggtcgccacctcgcgggctttattcacgcctgctacacccgccagccgcagctggcggcaaaattgatgaaagatgtgattgccgaaccgtaccgaaccaaactgctgccgggctttagcgaagcgcgtcaggcggccatggagatgggcgcccaggcttgcggcatctccggctctggcccaacgctgttcgcgttgtgtgataaaccggataccgcacagcgcgtcgccgactggcttggcgcgcactatctgcagaatcaggaaggctttgttcatatttgccggctggacacggcgggcgcacgcgtagtgggataaccaatgaaactgtataacttaaaagatcataacgagcaggtcagctttgcgcaggccgtcacccagggacttggcaagcatcagggcctgttctttccgcacgatctgccggaattcagcctgactgaaatcgacgacatgctggcgcaggactttgtcacccgtagcgccaaaattctatccgcctttatcggcgatgagatcccgcaggatgtcctgcagcagcgggtgcgcgcggcgtttgcgtttccggcgccggtaagcaaggttcaggaagatgtcggctgtctggagctgttccatggccctacgctggcgttcaaggatttcggcggccgctttatggcgcagatgctgacccacatcgcaggcgataagccggtcaccatcctcaccgcgacctctggcgacaccggggcggcggtggcgcatgctttctacggcctgccgaacgtcaaggtagtgatcctctatccgcgcggcaagatcagtccgctgcaggagaagctgttctgtaccctcggcggcaatattgaaaccgtggcgattgatggcgactttgatgcctgccaggcgctggtgaagcaggcgtttgacgatgaagagctgaaggcgacgctgggtctcaactcggctaactccatcaacatcagccgcctgctggcgcagatctgttactatttcgaagcggcggcgcagctgccgcaggaagcccgcaatcagctggtgatttccgtgccgagcggcaacttcggcgatctgaccgccggtctgctggccaagtcgctggggctgccgatcaagcgctttatcgccgccaccaacgccaacgacaccgttccgcgctatctgcagggcggcgagtgggcgccaaaagccacccaggcgacgctgtccaacgccatggacgtcagccagccgaacaactggccgcgcgttgaagagctgttccgccgtaaaatctggcgtctcagcgagctgggctatgccgcggtcgatgatgagaccaccaaagcagcgatgcgcgagctgaaggccatcggctacatctctgaaccgcatgcggcgattgcctggcgcgcgctgcgcgatcagctgcagccgggagagtacggcctgttcctcggcaccgcccatccggcgaagttcaaagagagcgtggaggagatcctgcaggagactctgccgctgccgaaggagctggccgaccgcgccgacctgccgctgctgtctcacaacctgccggcggatttcgccgcgctgcgtaagctgatgatgggctaagccaggcaataatatcggcaacatgatcgaccaaaccgggcagctattgcccggtttttatatttaacgcactttttccatatcagcaaaatttctctccataaaattccctacactattttattgtcagcgcactgcttttattgcaaactcttttacggattgtcctctttgccggataattccactggattatcttttttatttattatttcatgctgcttatatttatgctgctgattttattatgaagcagctatagatatcatttgttatagatgcattgttaatgcacaaggttttcaaggaggaaacatgcgtattttatctctttttttggtggtgttcgctttaacaggctgctccgggacaacgattggcggtaatgaagataaattaacgccagcctatctgaaacaacatctcattgtcggaaaaaccaccaaggccgaggttcgtcagtattttggtgccccggattctggtcatacgacggtgacggcgtcgggtaaagagagctggtattattcagtagataaagggatcaacctggtcagcctcgcgggttccatgatcccggtaaccggggcatcgcaagctgccgatgcggtcgataagtccagccaaaaagattcgaactcgctgatgattttcttcgatgaaaaaggcgtggtggaaaactgggtgcgttaaaataagtaataatctgcttaattatattgaaaaggggaatgactccccttttttattaccgtaacgtgttactgctcgtggcgtttaaacaccagttcgcctttctctgaggcatccgcatcaaagaaatagccttcgctattaaaagctttgagctgctccggctgggttaagcggttttcaataatgtagcgactcatcaggccgcgggctttcttcgcataaaaactgatcactttgaatttgccgttcttctcatcgaggaataccggcttgatcagctgaccctgcaattttggcgttttcaccgatttaaaatattcatcggaagccaggttgatgacgatatcgtcgccctggtcgcgcagcgcctgattcagcttctcggtaatggtatccccccagaactggtacagatctttgccgcgcggattttccagacggatccccatctccaggcggtagggctgcatcaggtctaacgggcgcagcacgccatacagcccggagagcatgcgcagatgctgctgggcgaagtcaaagtcgtcctcggtgagtgtctctgcctgcaggccagtgtagacatcgcctttaaaggcgaggatcgcctggcgggcattttgcggcgtaaagtcagggtgccagtcgtggaagcgggtggcgtttagatccgccagcttgtcactaatgctcatcagcttgccgatttgcggtgcgctcagcttacgggcgatgccgataagctgctgagaatactcgaggagttcgggctgggtatagcgagtcgttgccagcgggctttgataatcgagcgttttagcaggtgaaatcagaatcagcatatccagtccttgcaggtaatttcgacgaatcttaacaaaaaaagtgcatggtgggatcgatagctgcaattgccgcgctattcgcgcggcaattcattccaggcgcccggggccagctgttggtcaatatccgggtaacgagtggcatcgaaagtcggctggatacccagccgccgctgacgcagataatcgctggcgataatccgcaccgtcggggagagcagcagaatggccgtcaggttggtcatcgccatcagcgccatgatgatatccgcgctctgccagacgacaggcaggctaaccatggtccccaacagcaccatcaggacggtgagtattcgcagcccccagatatagcggggcttatccaggcgcaggaagaccagattattttccgcgtacacgtaattggctacgatagagctaaaggcgaacagcagcacgatgagggcgataaaacccgctccccagccgccgaccagcacgctcatcgcgtgttgcaagtcctgaataccgttgagcgtatattcattgtcgggccgcggcgccagcatgacgataatcgcgctggcggtacagatcacgatagtatcgataaacacgccaatcatctgcacgatcccctgcgccgccgggtgcggcggccaggaggcggcggccgcggcggcgttgggcgaagagcccatccctgcttcattggagaacatgccgcgctggaagccgctggtcagcgcctggctgatggtgtagcccaccgcgccggcggcggcctcctgccagccgaaggcgcagcgaaagatggtggcgaaaatcgtcggcagggcggtgatgtgccacaggccgatgagcaggctggtggcgatccacaacagcgccataaagggaacgatccattgcatcagacgcgccacgccgcgtaaaccacggaggatcgccagcaaaacgacaacggccagcacgccgccgctgaccgccgccggcagatcgaacgcatagcgcaaggcatgggccacggagttagcctgtacggtattgaagataaagccataggccagcaggaggaggatcgaaaacaggacgcccatccaacgcatgccgagcccgcgcgccatgtaccaggcagggccaccgcgaaactgtccgcggctatcgcgttctttatacagctgagcaagggaacattcagcaaagctgctggccatgccgagcagggcggaaacccacatccagaatacggcgccgggcccaccggcggcgatcgccagcgtcaccccggcaagattgccgctgccgacccgggcggcaaggctggtacagagcgcctgaaaggacgttaaaccacccggctgcgggtgcaggcttttttttagactgcggccgaatttgcgcacgtaacgaaactgaataccccgggtttgccagctaaaccagataccggcgcccagtagcagataaatcattactgagccccagagtatttcattgataaatgagagaaaatcaggcattaaacatcctcttgtccatgccggtacgccagtgtaagcgttaccaattaagtgacaatcctttcgctttcagcaaattaatctgcatagtttatcacactctgcgctcttctctcgtcggcggttgcgctgacccggcagcgtgttatcatctgggcagaccggttacatccccttaactgctgtttaagagaaatatatcatgacggataaattaacttctctgcgtcagtacaccactgtcgtcgctgacaccggagatattgcggcaatgaagctgtatcagcctcaggatgccaccactaacccttccctgattctcggcgcggctcagatccctgagtaccgtaagctgattgacgacgctgtcgcctgggctcgtagccagagcagcgatcgcgcgcagcagatcctcgatgcttccgataagctggcggtgaacatcggtctcgaaattctgaaactgatcccgggccgtatctccaccgaagtggacgcacgtctctcctatgacaccgaagcgtctatcgcgaaagccaagcgcatcatcaagctgtacaacgacgcgggcatcagcaacgatcgcattctgatcaaactggcctccacctggcagggcattcgcgccgctgaacagctggaaaaagaaggcattaactgtaacctgacgctgctgttctccttcgctcaggctcgcgcttgcgccgaagcgggcgtcttcctgatttcgccgttcgttggccgtatcctcgactggtacaaagccaacaccgacaagaaagagtacgcaccggcagaagatccgggcgtggtttccgtcagcgaaatctacgagtattacaagcagcacggctatgaaaccgtcgtgatgggcgcaagcttccgtaacgttggcgaaattctggaactggctggctgtgaccgcctgaccatcgccccggcgctgctgaaagagctgtccgaaagcgaaggcgccgttgagcgtaagctggtatataccggtgaagtgaaagcgcgtccggagcgtattaccgaatctgagttcctgtggcagcataaccaggatccgatggcggtagacaaactggcggaaggtatccgtaagtttgcgatcgaccaggaaaaactggaaaaaatgatcgacgaactgctgtaatcgcgcaggtggccgacgcccgtcggccacattatactgtctgtcccgcctccggcagtgtatcatttcgtttaacgccacagtttgaacggaataaccatgaataccttacgaatcggcttagtttccatttccgatcgcgcctccagcggcgtctatcaggacaaaggcatcccggcactggaagagtggctggcacgcgccctgaccacccctttcgagctgcaaacgcgtctgattccggatgagcaggccatcattgagcaaacgctgtgcgaactggttgacgaaatggggtgccatctggtgctgaccaccggcggaaccggccctgcgcgtcgcgatgtgacgcccgacgcaacgctggcgatcgccgatcgcgagatgccgggcttcggcgagcaaatgcgccaggttagcctacactttgtgccgacggctatcctttcccggcaggtcggtgtgatccgcaagcaggcgctgatcctcaaccttcccgggcaaccgaaagcaattcaggagactctggaaggggtgaaagatgctgacggcaacgtgctggtgcacggtattttcgcaagtgtaccttattgtgtacagttgcttgaagggccttatgtggaaaccgatggccgtgtagtagaagcttttcgtcccaagagcgccagacgcgaaactttatcctgaatttgatgcatttttgatataacctgcatcgctaatggtgtgccgttttatttacgatatagtgatttttactttacacactataaaacacgctgcacacctcaggatgaaattgcgttatgtcatatgcaaaccgaccgctcaaccgccaggattataaaacgctgacgctggccgccctgggcggcgcgctggagttttatgactttatcattttcgttttcttcgccgccgtcgtcggcgagctcttcttccctgcggatattcccgaatggctgcgccaggtgcaaacttttggcattttcgccgccggttacctggcgcgtccgctggggggcatcatcatggcccactttggcgatctggtggggcgcaagaaaatgttcaccctcagcatcctgctgatggcgctgccaaccctggcgatcggtctgctaccgacctatagctcggtaggtatcatcgccccgctgctattgctgctgatgcgtattctgcagggagcggcgatcggcggtgaagttccaggcgcctgggtgtttgtcgctgagcatgtcccggaaaaacgcattggtatcgcctgcggcacgctgacggccggcctgacggttggcattctgctggggtcggtggtggccacgcttatcaataccagtctgacgccgcaggggatccacgacggcggctggcggatccccttcctgctgggcggcgtatttggtctgatagcgatgtatctgcgccgctggctgcaggagacgccgatttttcttgagatgcagcagcgcaaagcgctggcgcaggagctgccggtaaaagcggtggcgctcaagcaccagaaggcggtggtgatctctatgctgctgacctggctgctgtcggctggcgtggtggtggtgatcctgatgtcgccggtctggctgcagaagcactatggttttgcgccggccattaccctgcaggccaacagcatcgccaccattatgttgtgcatcggctgtctgctcgccgggctggcggcggaccgcttcggcgccagccgcacttttatcgtcggcagcctgctgctggcggttgccagctgggcattttaccatcttgccggcgccagcccgcagcggctgtttctgctctacggtacggtggggctttgcgtcggcgtggtgggggcggtgccctatgtgatggtgcgggccttcccggcggaagtacgcttcaccggcatctctttctcctacaacctgtcgtacgcgatctttggcggcctgacgccgattgcggtcaccatgctgatgggggtgtcgccgatggcgccggcctggtatgtgctggccctgtcgttgatggggctaggattaggtatctggctgcgtcaggagctgatggcgccgacggggatgccggaaggggagctgcagcgttaacgatggctagctgatgctgataatgacctgccgccgccctgtgaccggacggcggcggaagattagcgcggttcgccgatcggcagcacggtgcggccgaactgttcgttcagcacttcacccatcgccaggtaaatagcgctggcgccacaaatcaggccgacccagccggctaccttcacaatgccttcgttatcggccaaatggccaatcgccagcagcgcgaacagtacggtcaggctcaggaagacaaactgcagcatgcgggctgccttcagggtgccaaagaacataaacagggtaaagacgccccacaggccgaggtacataccgaggaagtgcgcgtttggcgcgtctgccaggcccattttcggcatcagaagaatcgccaccagcgtcagccagaagctgccgtaggaggtaaaagcggttaagccaaaagtgttgccttttttgtattccagcaggccggcaaaaatttgcgcaatgccgccgtaaaaaatgcccatcgccaggatagctacatcgaatgcgaacaggccgctattcgccaggttaagcagaatagtggtcatgccgaagcccataaggcccagcggtgccggattagccaacttagtgttgcccataattcctcaaaattatcattaaaagggaagcattaccccgcgacttggcggcggggcgcggcataataatgaggcgctgaagggctgtctatgatctggcggggtatttttcaccaatttccgcggtgtctgacggcggctggagcatttgccgtaaacaggcaatatgcaggaccgcggggatggtgacccggtaggcgctgccgctcaccgctttcacgctgttcagcgcggcgccgagcggtccgcccagcccggcgccgcgcaccaggccatgaccgatgacgctcaccgcggcgtgcgtgcgcaggatggcggttaagcgttcgtccagcaacaaagtgacgccttcgcttagcttgcgatgcctcagcagatgagccatcaggctgtccagctcatggctccggcactccaccgcggcgagaaactgcgctttttgctccgcgttcagtttattccagctgtgctgcagaaaatgcgccagcaactgctgctcgatctgcggcgtcgacagctgtttgtcgaccttcgctttcagtcgtttacatacatccagcaggatcgcgcgataaaatttgccatggcggcgcagcgtgttggcgatgctatcgccgccaaaatgctgtagctcaccggcgattagctgccagttgcggcgataacgctccgggtgcccctccatcgctaaaaatgtctcgttgcgcaggagcgtgctggagagacggggtttgccattttccccgtgggtcagaatgcgggtaaaggcttccagatgcgcctcgctgcactcaggcagaaaggcgagatcgtcatcctccaggtaattaatatgcataacgttttctctcgggcaggggcgacattagtcatcgccgataattttcagtgatgccatatctgaggagtgcaccgtgtggccggagaaggcgatcttcttcacgcaacgtttgttgtcgttatcgctattgatgttgatccagccggtggtgctgccctctttgatcccggcggggacgttcagcgtgtggctggcgccgcggctggccttaaagtagaccgtcgccccggagagttgtacatcgccgcggtcggcgctgagctgaatgcgtttgaccacccggcagacggggagcgtcagcgtcaggtcgttggtttcattgcgcggcatagctatcacgccgagaattttatggtcgttagcggccgccgaggtgataaatgacacgccgaggataagccctacggaaagccggtatagcgatttcattaatttgtcccctgaataagcgaagtgcgatggcggggaagtttatcactgcgaaaacggggcttttagcgcgcaagtattgcgggttatgtcaatgatattatgaatgtatttcctattttaatccgttttttgtatgtatatttcgccgtcgtttttgccatccaacaaccttgttcggcaagtcatccgtaaccctgtgcgaatccgaggcaaaaaatttttatgcttgccccttgatgccggagtgggcgaccccatcttgtagtcaaccgcagtgaagaacctgaaaaaaaatgatgtctgggcagttgaaaccgcacgtttcgcccttattacaggttcacaaccacatgttgatcgaatttttagtggagacgtttagatgggtaaaattattggtatcgacctgggtactaccaactcttgtgtagcgattatggatggcactactgcacgcgtgctggagaacgccgaaggcgatcgcaccacgccttctatcattgcctatacccaggatggtgaaactctggttggtcagccggctaaacgtcaggcagtgacaaacccgcaaaacaccctgtttgcgattaaacgcctgattggccgccgcttccaggacgaagaagttcagcgtgacgtttctatcatgccatacaaaattgttgccgcagacaatggcgacgcatggctggatgtgaaaggcaccaaaactgcaccgccgcagatctctgctgaagtgctgaagaaaatgaagaaaacggctgaagattacctgggtgaaccggtaactgaagcggttatcaccgtaccggcttactttaacgatgcgcagcgtcaggcaaccaaagatgccggccgtatcgccggtctggaagttaaacgtatcatcaacgaaccaaccgcggccgcgctggcttacggtctggataaagaagtgggcaaccgtactatcgcggtttacgacctcggtggtggtactttcgatatctcgattatcgaaatcgacgaagttgatggcgaaaaaacctttgaagttctggcgaccaacggtgatacccacctgggcggcgaagacttcgatactcgtctgatcaactacctcgttgatgagttcaagaaagatcagggcattgacctgcgcaacgacccgctggccatgcagcgcctgaaagaagccgctgagaaagcgaagattgaactgtcttctgctcagcagaccgacgttaacctgccgtacatcactgcagacgcgaccggtccgaaacacatgaacatcaaagtgactcgcgcgaaactggaaagcctggtagaagacctggttaaccgttccatcgagccgctgaaagtcgctctgcaggatgccggtctgtccgtttccgatatcaacgacgtgatcctcgttggtggtcagactcgtatgccgatggtgcagaagaaagtggccgagttctttggtaaagaaccgcgtaaagacgttaacccggatgaagccgtggcgatcggtgctgccgttcagggcggtgtactgactggcgatgtgaaagacgttctgctgctcgacgtaaccccgctgtcgctgggtatcgaaaccatgggcggcgtgatgactgcgcttatcagcaaaaacaccaccatcccgaccaagcacagccaggtgttctctaccgctgaagacaaccagtctgcggtaaccatccatgtgctgcagggtgagcgtaaacgcgcgtctgataacaaatctctgggtcagttcaacctggatggtattaacccggcgccgcgcggcatgccgcagatcgaagtgaccttcgacattgatgctgacggtatcctgcacgtctccgcgaaagacaaaaacagcggtaaagagcagaagatcaccatcaaagcgtcttccggtctgaatgaagaagaaattcagaaaatggttcgcgaagcagaagctaacgccgaatctgaccgtaagttcgaagagctggtacagacccgcaaccagggcgaccatctgctgcacagcactcgtaagcaggttgaagaagcaggcgataaactgccggctgacgacaaaactgccattgagtctgcgctgaccgcgctggaatcttctctgaaaggcgaagacaaagcggatatcgaagcgaaaatgcaggcgctggcgcaggcttctcagaagctgatggaaattgctcagcagcagcacgctcagcagcaggcgggttccgctgacgctcaggcgagcaacgcgaaagacgacgatgttgtcgacgctgagttcgaagaagtgaaagataaaaaataatcgccctttgaacgggtaaaacactggcacgggcgaagaggtttcctctccgcccgtgcacgcatgttaaggggctgaaaaacaccgatggcaaagcaagattactacgagattttaggcgtttccaaaacagcggaagagcgtgaaatcaaaaaggcttataagcgcctggccatgaaatatcacccggaccgcaaccagggtgataaagaggctgaagccaaatttaaagaaatcaaagaagcgtatgaaatcctgactgatgcccagaagcgtgcggcctacgatcagtacggccacgcggccttcgaacagggcggcatgggcggcggcggcggttttggcggcggtgccgacttcagcgatatctttggcgatgttttcggcgatatctttggtggcggacgtggtcgtcagcgcgcggcacgcggcgccgatctccgttacaacatggagctgacgctggaagaagcggtgcgcggcgtcactaaagagatccgtattccgacgctggaagagtgcgacgtctgccacggcagcggcgccaaggccggcagcaaaccgcagacctgtccgacctgtcatggcgcgggccaggtgcagatgcgccagggcttttttgcggtacagcagacctgtccgcactgccagggacgcggtacgctaattaaagatccgtgcaataaatgtcatggccatggccgcgtagaaaaaaccaaaaccctgtcggttaaaattccggcgggcgtggataccggtgaccggatccgtctggcgggcgaaggcgaggccggcgaacatggcgcgccggcaggcgatctgtacgttcaggttcaggtgaagcagcacgctatctttgaacgtgaaggcaataacctgtactgcgaagttccgatcaacttcaccatggcggcgctgggcggtgagatcgaggtcccaacgctcgacggccgcgtgaacctgaaaattccaggtgaaacccagaccggcaagctgttccgcatgcgtggaaaaggcgtgaaatccgttcgcggcggcgcgcagggcgatctgctgtgccgcgtagtggtggagacgccggtggggctgaatgagaagcagaagcagctgctgaaagagctgcaggagagcttcggcggtccgaccggggaaaacaacagcccgcgttcgaaaagcttctttgacggcgtgaagaagttcttcgacgacctgacccgctaattccacctttgttgatatccggcccgggcctttgctgcccgggctttttttcgccttagaactccccgttgactcgtaaaaagcgaatattagcgcaacttaaatctgattttttcgagttatcagtatgtgtattatgcttttatcgagttattcaccaacaggatgaaagtaaaagtgaaacatctgcaacgattctttagtagcgatgcttccggcggcattgtcttaattatcgccgccgcgctggcgatggtgatggccaataccagcgtgaccagcggtctgtatcactccttccttgagacgccagtacagctgcgtgtgggcgcgctggagatcaacaagaacatgctgttatggatcaatgatgccctgatggcggtgttctttttgctgattggcctggaggtcaaacgtgagctgattcaggggtcgctggcgagccgccgtcaggcggtcttcccggtaatcgccgcgctgggcgggatgatcgtcccggccctggtctacctggcctttaacgcccaggatcctgtcgccagagaagggtgggcgatcccggcggcgacggatattgcctttgccctcggcgtgctggcgctgttaggtagccgggtcccgacggcgctgaagattttcctgatggcgctggcgattattgatgacctcggggctatcgtgattatcgcgctgttttatacccacgacctgtccatgctctcgctgggcgtggcggcggcggcgatcgcggtgctggtggccctgaatctgagcggcgtgcggcgtaccgggatctatattctggttggcgcggtgctgtggacggcggtgctgaagtctggcgttcacgcgacccttgccggggtgattgtcggctttatgatcccgctcgaggaaaagcatggcaagtcgccggccaaagcgcttgagcatgtcctgcacccgtgggtggcgtttatgatcctgccgctgtttgccttcgcgaacgcgggggtctcactgcagggggtcacccttgccgggctgacgtcgctcctgccgctgggcattatggctggcctgtttatcggtaagccgctggggattagcctgttctgctggctggccctgaagctgaagtgggcttcgctgccggagggaaccacctgcaagcaaattatggcggtggggatcctgtgcgggattggctttacgatgtcgattttcatcgccaccctggcctttggcagcgtggatcccgcgttgatcaactgggccaagcttggcattctgatcggctcagtgctatcagcggtcgtcggctacctcatactgcgtcagcgcgtgacggatactcgcctcgcggtataacctttttgcaggagagcccgccaggctctcctggacattatcagggagagaagcatgtcacatattaactacaatcatctgtactacttctggcacgtgtataaagaagggtccgtcgtgggcgcggcggaggcgctgtttctgacgccgcagaccattaccgggcagatcaaagccctggaggagcgcctgcaggggaaattatttaagcgaaagggaagggggcttgagccgagcgagctgggggagctggtttttcgctatgccgacaggatgtttaccctcagccaggagatgctcgacatcgtcaactatcgcaaagagtcgaacctgctgtttgacgtcggcgtggccgatgcgctctcgaaacggctggtcagcggcgtgctggatgccgctgtcgttgagagcgagcagattcatctgcgctgttttgaatccactcatgagctgctgctggagcagctgagccagcataagctcgacatgattatctctgactgcccgatcgactcgacgcagcaggaagggctattttcggtgaagattggcgagtgcagcgtcagcttctggtgcatgaatccggcgccgacgaagccgttcccggcctgcctcgaagagcggcggctgctgatccccggccggcgatcgatgctgggacgtaagctgctgaactggattaacgtgcagggcctgaaggtggagatcctcggcgagtttgacgacgcggcgctcatgaaagccttcggcgccgcacataatgcgatatttgtcgcgccgacgctctacgcgcatgatttctaccatgatgaatcgattgtcgaaattggccgtatggatagcgtgatggaggagtatcacgctattttcgctgaacgaatgattcagcatccggcggtacagcgtatctgtaatcgcgattattcgtcgctgttcaccgaaccccgatagccggaaggcgtgggctggcgtggctcagatcgcgccagcgtgcgctaccgggggaagatgataggcataaaaaaacccgctttcgcgggtttctttaacaaagttcagcaagcaggcgattaagccagtttgttgatctgtgcagtcaggtttgctttatgacgcgcagctttgtttttgtggatcagacctttagcagcctgacggtccacgatcggttgcatttcgttaaatgctttctgtgcagcagctttgtcgccagcttcgatagctgcgtatactttcttgatgaaagtacgcatcatagagcgacggcttgcgttgtgcttgcgagccttttcagactgaacggcgcgcttcttagctgatttgatattagccaaggtccaactcccaaatgtgttctatatggacaattcaaaggccgaggaatatgcccgtttagccttcttttgtcaatggatttgtgcaaataagcgccgtttaacaccacagcgcttcattacgtagtgatggcgcaagattctaccagcttgttgcaggcgaatacagcttttccaccataaaaatcgccgggcgcggccagttttcccgctttctcgcgctgagtgaatgaattcctgagaactttcgttgccgaggtgcaatcgctggttaacgttgacagttgtacaaggtatactcggacgattttcactgttttgagccagacatgaagctgatacgcggcatacataatctcagtcaggccccgcacgggtgcgtgctgaccattggtaatttcgacggcgtgcatcgtgggcatcaggcgctgctgcagcggttgcgcgaagagggccgccagcgcggtttaccggtcgtggtgatgatttttgaaccccagccgctggagctctttgccgctgataaagccccggcgcgattgacccgcctgcgtgaaaagctgggctatctggctgaaagcggggttgactatgtattgtgcgttcgctttgaccgccggttcgccgcgctaaccgcgcaggattttatcagtgaactgctggtgcgtcgcctgggcgtgcagttcctcgccgttggtgacgatttccgctttggcgctggtcgccagggggatttcttgttattacaaaaggcgggggcggaatatggcttcgacgtcaccagcacccaaaccttctgcgaaggcggggtgcgaatcagcagcacggcggtacgccaggcgctggccgatgacgatctcctgctggcggagacgctgctcggtcatccgtttagcatctccggacgcgtcgtgcatggtgatgaactaggccgaaccataggttttccgacggcgaacttaccgctgcgtcgtcaggtttccccggttaaaggggtctatgcggtagaagtgacagggctgggcgacaaaccgatagcgggcgtcgccaatattggcacccgtccaacggttgcgggcgtgcgtcagcagctcgaagtacatctgttggacgttgtaatggacctctacggtcgccatatcaatgtaatactgcgtaaaaagatacgtaacgagcagcggtttgcgtcgctggacgagctgaaggcgcaaatcgcacgtgatgagttaacggcccgcgaattatttgggctgaccagccaggcctgagccactggtgtttatcaaaccgaaatacggaaccgagaatctgatgagtgactataaatcgaccctgaatttgccggaaacagggttccctatgcgtggcgacctcgccaaacgcgaaccgggaatgctggcgcgttggaccgatgatgacctgtacggcatcattcgtgcagccaaaaaaggcaaaaaaaccttcattctgcatgatggccctccttatgcgaatggcagcattcatattggtcactcggtaaacaagattctgaaagacattatcgttaagtccaaaggactgacgggctatgactcgccttacgttccgggctgggactgccacggtctgccgatcgagctgaaagtggagcaggaatacggcaagccgggtgagaaatttaccgctgccgaattccgcgctaagtgccgcgaatatgccgccgagcagatcgatggccagcgtaaagactttatccgtctcggcgtgctgggcgactggtcgcatccgtacctgaccatggacttcaaaaccgaagccaacatcatccgcgcgctgggcaaaattatcggtaatggccacctgcataaaggcgccaaaccggtgcactggtgcgtagactgccgttccgcgctggcggaagcggaagtggagtattacgacaaaacctctccgtctatcgatgtcgcgttccacgcggtagacaaagccgcggtactggcgaaattcggcgtagccgacgtcaacggtccggtgtcgctggttatctggaccaccacgccgtggaccctgccggccaaccgcgctatctctctgtctcctgagttcgactatgcgttggtgcaggttgacggccaggcgctgatcctggcgaaagacctggttgagagcgtaatgaagcgcgttggcgcgacggactacactattctggcggcggtacaaggttctgagcttgagctgatgcgctttaagcatccgttcctcgatttcgacgtgccggcgatccttggcgaccacgtgacgctggatgccggtaccggtgcggtgcataccgctggcggccacggtccggacgactacaccatcagccagaaatacggtctggaaatcgccaacccggttggcccggacggcgcttacctgccaggtacctggccgtccctggacggcattaatgttttcaaagccaatgacatcatcgttgagatgctgcgtgagcgtggcgcgctgttacacgttgagaaactgcagcacagctatccatgctgctggcgccacaagtcgccgatcatcttccgcgccactccgcagtggttcgtgagcatggatcagaaaggcctgcgcgcgcagtcgctgaaagagatcaaaggcgtgcagtggatcccggactggggccaggcgcgtatcgaatcgatggtcgctaaccgccctgactggtgtatctcccgtcagcgcacctggggcgtgccgatgtcgctgttcgtgcataaagaaacccacgaactgcacccgcgtacccttgagctgatggaagaagtggcaaaacgcgttgaagttgacggcatccaggcgtggtgggatctcgattcccgcgacattcttggcgatgacgccgacagctatgagaaagtgccggataccctcgacgtctggtttgactccgggtcgacccactcttccgtggttgacgtgcgtccggaattcgccggtcacgccgccgatatgtatctggaaggttctgaccagcatcgcggctggttcatgtcctcgctgatgatttccacggcgatgaaaggcaaagcgccatatcgccaggtactgacccacggcttcaccgtcgacggtcagggccgcaaaatgtccaagtctatcggcaacaccgttagcccgcaggacgtgatgaacaagctcggcgccgatatcctgcgcctgtgggtggcttccaccgactacaccggtgaaatggcggtctctgacgagatcctcaaacgcgctgcggacagctatcgtcgtatccgtaataccgcgcgcttcctgctggcgaaccttaacggtttcgatccggcgaaagacatggttataccggaagagatggtggtgctggaccgctgggcggtcggctgcgcgcaggcggcacaggaagatatcctgaaagcctacgaatcctacgacttccatgaagtggtgcagcgcctgatgcgcttctgctccatcgagatgggctcgttctacctcgacatcatcaaagaccgccagtacaccgccaaggcggacagcgtggcgcgtcgcagctgccagaccgcgctgttccatatcgtggaagcgctggtgcgctggatggcgccgatcatgtccttcaccgcagatgaaatctggggctatctgccgggcgagcgtgagaaatatgtcttcaccggcgagtggtatgaaggtctgttcggcctggccgacgacgaagcgatgaacgatgatttctgggacgagctgctgaaggtgcgtggcgaagtcaacaaggtgatcgagcaggcgcgtgcggataagaaagtcggcggctcgctggaagcggcagtcacgctgtatgctgatgccgatctggcggctaagctcaatgcgctgggcgatgaattgcgatttgtcctgttgacctccggggcgaacgtcgcagactatgcgagcgcgtccgctgatgcgcagcaaagcgaactgcttaaagggctgaaagtcgcattgagtaaagctgaaggtgagaaatgcccgcgctgctggcattacaccaccgatatcggcaaggtggcggaacacgcggaaatctgcggacgctgtgtgagcaacgtcgccggtgacggcgagcaacgtaaattcgcctgatgagtaaatcgatctgttcaacggggctacgctggctgtgggtggtcgtagccgtgctgattatcgatctgggcagcaaattcctgatcctccagaacttcgctctgggggagacggttccgctgttcccgtcgcttaatctgcattatgcccgcaactatggcgcggcctttagctttctcgccgacagcggcggctggcagcgctggttcttttccgggatcgcgatcggcatttgcgtggtgctgatggtgctgatgtaccgttcgaaggcgacgcaaaagctgaacaatattgcctacgcgctgattatcggcggcgcgctgggcaacttgttcgatcgcctgtggcatggctttgtggtcgatatgatcgacttctacgtcggcgactggcattttgccaccttcaacctcgccgatagcgcgatctgcatcggcgcagcgctgattgtgctggaaggcttcctgccgaaaccgactgtgaaagagcaggcgtaaatctcaatgccgggtgacgtgacgcttacccggcctacagaatttttggcccccgtaggcccggtaagcgtaatgccgccgggcaccgggtgacctaaacaagcgagcaatttgcatgtctaaatccgtacagagcaacagcgcggtactggtgcacttcactctgaaactggacgacggctccactgccgagtccacccgcagcaacggcaaaccggcgctgtttcgcctcggcgacacctctttgtctgaagggctggagcaacagcttctcggtttgaaagagggggagaaaaaggccttttcgctggagcctgacgccgcctttggcgtacccagcccggacctgattcagtatttctctcgccgcgagtttatcgacgctggcgagccggagatcggcgcgattatgctctttaccgcaatggatggcagcgaaatgcctggcgtgatccgcgaagtgaacggcgattccatcaccgttgacttcaaccatccgctggccgggcgcactgttcattttgatattgaagtgctggagatcgatccggcgctggaggagtaacatgcagatcctgttggctaacccgcgcggtttttgcgctggcgttgaccgcgctatcagcattgtagaaaacgcgctgacgctgtatggcgcaccgatctatgttcgtcatgaagtggtgcacaaccgctatgtggtggatagcctgcgcaagcgtggcgccatttttatcgaacagatcagcgaagtgccggacggcgcgatcctgattttctccgcccacggcgtgtcgcaggcggtacgcaacgaagcgaagagccgcgaccttacggtgttcgatgccacctgtccgctggtgaccaaagtccatatggaagtcgcccgcgccagccgccgcggcgaagagtcgattctgattggccatgccggccacccggaagtcgaaggcaccatgggacagtacaacaacccgcaaggggggatgtacctggtcgagtcgccggaagacgtgctgaagctggaagtgaaaaatgacgcccggctgtcgtttatgacccagaccacgctctccgtcgacgatacctcggatgtgattgacgccctgcgcgcgcgttttccgaaaatcgtcggcccgcgcaaagacgacatttgctatgccaccactaaccgtcaggaagccgtgcgcgcgctggcggagcaggctgacgtagtgctggtggtcgggtcgaaaaactcctccaactctaaccgcctcgccgagctggcgcagcggatgggtaaggcggcttacctgattgacgacgcctccgatatccaggaagcgtgggtcaaggatgcggcctgcgtcggcgtgacggcgggcgcgtcggcgccggatattctggtgcagaacgtcattacccgcctgcaggagctgggcggcggcgaagccgtgccgctggaaggccgggaagagaatatcgtctttgaagtgccgaaagagctgcgtgtggatgtccgtgaagtagagtaagttctttcctccagcagtatgagaagatgccagacttaacgtctggcatttttttagggagaaaccatgcgcttaccaatcattcttgataccgatccgggcatcgacgatgccgccgccattgccgcggcgctgttcgcgcctgagctggatctgcagttgatgaccaccgtagcgggcaatgtctcggtggagaagacgacccgtaacgcgctgcaattgctgcatttctggaatgccgatgtaccgctggcgcagggggcgtcgatgccgctggtgcgtccgttgcgcgacgccgcctcggtgcatggcgaatccggcatggaggggtatgactttgttgagcatcaacgtcaaccgctggcgaaaccggccttccaggcgatccgtgatgcgctcatgcatgctgccgagccgatcaccctggtggcgattggcccgctgaccaatatagcgctgctgctgacccagtacccggaatgcgtgtttaatattcgccggctggtgatcatgggcggttcggcgggccgcggcaacttcacgccgaatgcggaattcaatatcgctatcgacccggaggccgccgcgaaagtgttccacagcgggctggagattgtgatgtgcgggctggacgtcaccaaccgggcgctgctggcggcggattatctggcgacgctgccgacgctgaaccagaccggtaaaatgctccatgcgctgtttagccactatcgcagcggcagcatgagcagcggtctgcgcatgcacgacttgtgcgctattgcgtggctggcccgcccggaactattcactctccagccgtgctttgtggcggtggagacgcaggggacctggaccgccggcaccacggtggtggatatcgaaggacgactgggccagccggcgaacgcccaggtggcgctggacatagacgtcgaagggtttcagcgctgggcggcggaggtgattgccctggcgccgtgatatatcactcgattttcaaggagagaagcaatgacctatggacaggcgtatttgagcggctggaaagagacctttaactttagtggccgcgccagccggcagcagttctggacgttttttctcatcaatgtattgatcgccgccgcgccgctggcggcctggtgtctggcaaccagcgttaaccctcaatacggcatcctcagttttgttgttattccctttgccgcgctctggctgctgttgatggcgatccccctgctggctgtaggctgccggcgaatgcatgatatcggccgctccgggatctggtttgtgttgggggttatcattccgtggtttgcaattatttcgctggctctgtgctgcctgcgctcagcgccggcaccgtctcgctgagataatcgatcatcgcccgcatcctggcgggcatatgcttatctcccgcccacagcagccacagatcgccggagtagctgctgataaattcccactcgggcagcacctgcacgatgtcgccgttcgccagcgcctcacgggcggtgaacagcggcaggctgccgatccctaaatgctgtctgaccgcgtcgaggcgtacggcggtatggttggcggcgtaccgcccgtaggttggcaccgtttctgttttgccttcccgacggaacttccagcgcgcatcggcgggcgtttcgccaaggctaatgcagctatgcgcgcgcagatcctgcggcgtgtacggcgtaccgtgctgctgtaaataggcctcagtggcgcagataacgtgtttgattggcatcagcggtttgccatgcaggccgggggagggggtatcggtgatgcgtagcgccagatcaataccgtcatcgataaaatcgagagggcgatcttccagccgcaggcagacgtccacctgcgggtagcggtggaaaaacgccatcatcagcgggtggatcacaaagcggccgacggctttcgggacgctgagcgtcagctttccctgggcgaccgtttggcgactgcctgcggaatccattgcctgtcgcgccgcttccagcatctgctgggcatgctgatatatcgtttccccggcatcgctaagacgcagcttgcgggtggtacgctgcagcagtttgcagcccatctctcgctccagccgtgacacgctgcggctaacggctgaaggggtaatgccgttctggcgggcgacggcggagaagctgccctggtcgactatctgaacgaaaagagcgaggtcgggcaggaggttcagattcatttgtgctcccggagcaagagtgcattggcgggtggtgggattatcgctgtcggcattaataatatactggccggacagagaggagaatcactatgactgaacgggtttattacaccagcgatgctaccgacgggcgcgcccagatcatcgcctgcactgcagaagcggatggccgttacgccatcgaactggatcggacgctgtttcacccgcaagggggcggtcaaccggcggaccgtggatggattgccgggcaggtggttgagacggtggctgtgcgcggcgaaagggtgttgcatattctgtcgcaaccccttcccctcggtgaagtggagatgaaaattgatgcctccgcgagacagctgcatgctcgtctgcattctgccggccacctgcttggcctggcgggcgaacagcttggctggcaaccggtgaaagcgcaccactggcccggcgaagggcggataacctttgccagcaggaatagcgccgcgctgccggacgccagtgcgctactggcgctagtaaaggcatggcaggcgcaggacttaccgcgtcaggtgacgttcgctgatggcatgcgcaaggtgggattcggcgagctgccagcctatccctgcggaggcacccacgtcgcccgtctggcggagctgggcgacattgtcattagtcagattaagatgaagaaggggcagctggtggtcagctacaccctggcgtaaggctttctgctctaccggaagtataatgtttccatagcatttcaatgctggtcggtcgagtttgccagatttagtgcatcttatttcttgaaaccaacagatgacgaaaacgtcgattatcgtctcagagagagcacccgcaaagcacgcatttcagcacaatcgtatagtttttactgatatcgtccgccgtttgtcataaatttctaattatcggcgtttttgagtagcggcccgctgacgggctggttactctgaaaacaatttacgtaatgttaacaaaagagaatagctatgcatgatgcacaaatccgcgtggccatcgccggcgcgggcggccggatgggacgccagttaattcaggctgcattgcagatggaaggcgtggcgctgggcgcggcgctggagcgcgaagggtcaagcctggtgggcagggacgccggcgagctggcgggcgccggcaaagcgggcgtcgcggtgcagagcagcctggcggcggtaaaagatgatttcgacgtgttgatcgattttacccgcccggaaggcacgctgaaccatctggcgttttgccgcgagcacggcaaagggatggtcatcggcaccaccggttttgacgacgctggcaaacaggcgattcgcgatgccgcgcaggacattgccattgtcttcgccgctaactttagcgttggcgtcaatgtcctgttgaagctgctggagaaggcggcgaaggtgatgggcgactataccgacatcgaaattatcgaagcgcaccaccggcataaagtggatgcgccgtcaggcaccgcgctggcgatgggcgaagcgatcgccggggcattgaacaaagatcttaaggactgcgcggtctacagtcgtgaaggctacactggcgaacgcgtcccgggcaccatcggcttcgcaaccgttcgcgcgggggatatcgtcggggagcatacggcaatgtttgctgacatcggtgagcgtattgaaatcacccataaagcgtccagccgcatgacctttgcaaatggcgctgttcgttcagcattatggctgaaaggcaagaaaaatggcctgtttgatatgcgtgatgtgctggatctgaatagtttataacgattattacccatcgtgatgtggttattgctatcaataagttattgatgcagagggcaatattttgttgcccttttttatttttgcgaattatggcgtatgttttaagtgtaatgcgtaaaaaatacagtattagcgtgttttttagtgaatgaaatgtaaattttgaccatctggtccacttttttgtcgatcatctctctgttttacactcttccacatccgcaagcgttttctcagccaggtttgttgatctttttggcgtaaaaatcacgtgttacgcaccagtggcgtaaaatgacattaaaaatctccgctttaagttgacttttatccgacatctctccagaatgccgccgtttgccaaaaatctgcgggcaacagatttgcattgattcagatcgtgtttatgaattaatatgcaaataaagtgagtggatattctctggaggatgttttgattaagtcagcgctattggttctggaagacggaacccagtttcacggtcgggccatcggggcaaccggcacggcggttggggaagtcgttttcaatacttcaatgaccggttatcaagaaatcctcactgatccttcctattcccgccaaatcgtcactcttacttatcctcatattggtaatgtcggcaccaacgccgccgatgaagaatcttctcaggtacatgcgcagggtctggttattcgcgatctgccgctgattgccagcaacttccgcagtactgaagacctctcttcttatctgaagcgccataacatcgtggcgattgccgatatcgatacccgcaagctgacgcgtctgctgcgtgagaaaggggcgcaaaacggctgcatcatcgcgggcgacagcccggatgcccagctggcgctggaaaaagcgaaagcgttcccaggcctgaacggcatggacttggcgaaggaagtgaccaccgcagaaacctatagctggacgcaaggcagctggaccctggcgggcgacctgccggaagcgaaagcggaaagcgagctgccgttccacgttgtggcatatgacttcggcgcgaaacgcaacatcctgcgcatgctggttgaccgcggctgccgcctgacggtggtgccggcgaagacctccgccgcggacgtgctggcgctcaatccggacggtatcttcctctccaacggccctggcgacccggcgccgtgcgattacgctatcgaggcgattgaaaaattccttgagaccgatattccggtattcggcatctgccttggccatcagctactggcgctggcgagcggtgccaagaccattaagatgaagttcggccaccacggcggcaaccacccggtgaaagatattgataacaacgtggtgatgatcactgcccagaaccacggtttcgccgtagatgaggcgacgctgccggccaacctgcgcgtgacccataagtcgctgttcgacggcaccctgcaggggatccatcgtaccgacaaaccggcgttcagcttccaggggcaccctgaagcgagcccggggccgcacgatgccgcgccgctgttcgaccactttatcgagttaattgagctctaccgtcagtccgcgaaataatcagaacctgtttatgttctgctgtgctcgggaatacggcgttaaaaatttgttcaaaatgctcatttacgttttgtaaactgcgctttctcacaaattttttccttgtctacccatcgctcgcgacgaccataaacaggttcttcggagaagaaagcaatgccaaaacgtacagacataaaaagtatcctgattctgggcgcgggcccgattgttatcggtcaggcgtgtgagtttgactactccggcgcccaggcgtgtaaagcgctgagcgaagagggctaccgcgttatcctggtgaactctaacccggcgaccatcatgaccgacccggaaatggccgatgccacctacatcgagccgattcactgggaagtggtgcgtaaaatcatcgaaaaagagcgcccggatgcggtgctgccgaccatgggcggccagacggcgctgaactgcgcgctcgagctggagcgtcagggggtactggctgaattcggcgtgaccatgattggtgccaccgccgatgcgattgataaagccgaagaccgtcgccgtttcgatatcgcaatgaagaaaatcggcctcgacaccgcgcgctctggtatcgcccacacgatggaagaggcgctggcggttgccgccgacgttggtttcccgtgcatcatccgtccgtccttcaccatgggcggcaccggcggcggtatcgcctataaccgcgaagagttcgaagaaatctgcgaacgcggcctggatctctctccgaccaacgaactgctgatcgatgaatcgctgatcggctggaaagagtacgagatggaagtggtgcgcgataagaacgataactgcatcatcgtctgctccatcgaaaacttcgacgccatggggatccacaccggtgactccatcaccgttgccccggcgcagaccctgaccgacaaagagtaccagatcatgcgtaacgcctcgatggcggtgctgcgtgaaatcggcgtcgaaaccggcggctctaacgtgcagttcgcggtcaacccgaaaaacggtcgcctgatcgttatcgaaatgaacccgcgcgtctcccgctcctcggcgctggcctctaaggccaccggcttcccgattgctaaagtggcagccaagctggcggtaggttatacccttgacgagctgatgaacgacatcaccggcggccgcaccccggcttcctttgaaccgtccattgactacgtggtcactaaaatcccacgctttaacttcgaaaaattcgccggcgccaacgaccgtctgaccacccagatgaagtctgtcggcgaagtgatggcgattggccgtacccagcaggaatccttgcagaaagcgctgcgcggtctggaagtgggcgctaccggcttcgacccgaaagtgagcctcgacgatccggaagcgctgaccaaaatccgccgcgagctgaaagatgccggcgctgagcgtatctggtatatcgctgacgcgttccgcgcgggcctctcggttgacggcgtcttcaacctgaccaacatcgaccgctggttcctggtacagattgaagagctggtccgtctggaagagaaagtggcggaagtgggcatcaacggcctcgacgctgacttcctgcgcaccctgaagcgtaaaggctttgccgatgcgcgtctggcgaagctggcgggcgtgcgggaagcggaaatccgcaagctgcgcgaccagtatgacctgcacccggtctacaagcgcgtggacacctgcgctgcggaatttgctaccgataccgcctacatgtactccacttatgaagaagagtgtgagtccaacccgtccgttgaccgcgataaaatcatggtcctcggcggcggcccgaaccgtatcggtcagggtatcgaattcgactactgctgcgtacacgcctcgctggcgctgcgcgaggacggttacgagaccatcatggtcaactgtaacccggaaaccgtctctaccgactacgacacctccgaccgtctgtattttgagccggtgaccctggaagacgtgctggaaatcgtgcgcatcgagaagccaaaaggcgttatcgtccagtacggcggccagaccccgctgaagctggctcgtgccctggaagctgccggcgtgccggttatcggtaccagtccggacgctatcgaccgggcggaagaccgtgagcgcttccagcacgcggttgaccgtctgaagctgaagcagccggcgaacgccaccgtcaccgccattgagcaggcggtagagaaagcgaaagagattggctacccgctggtagtgcgtccgtcttatgtgctcggcggccgggcgatggagatcgtctatgacgagcaggatctgcgccgctacttccagaccgcggtcagcgtctccaacgacgcgccggtgctgctggatcgcttcctcgacgatgcgattgaagtggatgtcgatgccatctgcgatggcgaaatggtgctgattggcggcatcatggagcatatcgagcaggcaggcgtccactccggcgactccgcctgttccctgccagcctacaccctgagcaaagagattcaggatgtgatgcgcgagcaggtgcagaagctggccttcgagttgcaggttcgtggcctgatgaacgtccagttcgcggtgaaagataacgaagtttatctgattgaggtcaacccgcgtgcggcgcgtaccgtaccgttcgtctccaaagccaccggcgtcccgctggcgaaagtggcggcgcgcgtgatggccggtaagacactggcgcagcagggcgtgaccaaagagatcatcccgccgtattactcggtgaaagaggtggtcctgccgttcaataaattcccgggcgttgacccgctgttagggccagaaatgcgctccaccggggaagtgatgggcgtcggccgcacctttgccgaagcgttcgccaaagcgcagctgggcagcaactcgaccatgaagaaacagggtcgcgcgctgctctccgtccgcgaaggcgataaagagcgcgtggttgacctggcggcgaagctgctgaagtttggcttcgagctggatgcgactcacggtacggcgattgtgctgggtgaagcgggcattaacccgcgtctggtgaacaaggtgcatgaaggtcgtccgcacattcaggaccgcatcaagaatggcgaatatacctacatcatcaacaccaccgcaggtcgccaggcgattgaagactccaagctgattcgccgcagcgcgctgcagtacaaagtgcattacgacaccaccctgaacggcggctttgccaccgcgatggcgctgaacgctgacgccaccgagaaggtgatttcggttcaggaaatgcacgcgcaaatcactaaataagcttcccggcctggccggatagcaacaatcctgggctgacgacatcgtcagcctatttttttgggccgcagccatcttcagagagttctgcttttaaccccctgtcgggtcaggctaactatagttagcaccataacgatacctattgatgaaaagacaggaggatacaatgcggaacaatattctggtggcatccgcactggcagcgacggcaatcatgttcgtggccggctgctcatcgaatcagtcgatcaaaaccaccgacggcaagaccattgtcaccagcggtaaaccgcaggtggatgatgacaccggcctcgtctcatacaaaaatgccgaaaccggccgcgtggagcagattaaccgcgaccaggtgaagtccatggacgagctggataactaaggcctgacgttaaccctcagggcgcgcgttgcgtaagccatcgcgacataaatcacagttatcattgtaagcggttcgcttaactgtctacactcttgctgattacgacaagagcaaacgcaggccaatcaatgattctgataatttatgcgcatccttatccgcagcattctcatgcgaataagcgaatgcttgaacaggcagggacgcttgaaggcgtagagatacgctccctctatcaactctatcccgactttaatatcgatgttgccgccgagcaggcggcgctggcccgtgccgatctggttatctggcagcatcctatgcagtggtatagcgtaccgccgctgctcaagctgtggatggacaaggtgctgtcgcacggctgggcctatggtcacaacggtattgccctgcgcggtaaatcgctgatgtgggcggtgaccaccggcggcggtgaaagccacttcgacatcggctcattccccggttttccggtgctggcgcagccgttgcaggcaaccgcgctttactgcggaatgaaatggctgccgccgttcgctatgcactgcacctttatctgcgatgatgaaacgctgcaggcgcaggcccgccgctatcgtcaacgcttaatcgactggcaggaggcacaccagaatggatagccatacgctgatacaggcgttgatttacctcggcgccgcggcgctgattgtgcccatcgccgtccgtctggggctggggtcagtgctgggctatctcatcgccggctgtattatcggcccgtgggcgctgcggctggtgaccgatgccgaggcgattctgcactttgccgagattggcgtggtgctgatgttgttcgtcattggtctggagctcgatccgcagcgcttatggaagctgcgcgcctcggtgtttggcggcggcgcactgcagatggtggcctgcggggtgttgatcggcctgttctgcatgctgctgggcctgcgctggcaggtggccgagctgattggtatgactctggcgctttcctcaaccgcgatcgctatgcaggcgatgaatgagcgcaatctgacggtgtcgcagatggggcgcagcgccttcgcggtgctgctgttccaggatatcgccgcgatcccgctggtggcgatgatcccgctgctggcggccagcggcggcgccacttcgctgatggcttttgccctctccgcgctgaaagtggccgcagcgctggcgctggtggtggtccttgggcgctatctgacccgcccgctgctgcgctttgtcgcccgttccggcctgcgcgaagtgttcagcgccgtggccctgttcctggtcttcggctttggcttattgctggaagaggtggggctgtcgatggcgatgggggcgtttctcgccggggtgctgctggccagttccgaatatcgtcatgcgctggagagtgatattgagccgtttaaaggactgctgttggggctgttctttatcggcgtcggcatgtcgattgatttcggcaccctggtcacccatccgctgcgtattgtgattttgctggtcggtttcctggcgataaaaatgctgatgctgtggcttatcgccaggccgcttggcgtaccgcgcgcccagcgccgctggtttgcggtgctgctggggcaggggagtgagttcgcgtttgtggtgtttggcgccgcgcggatggcggatgtactggacggcgaatgggcaaaagcgttgaccctggcggtggccctgtcgatggcggcaacccccattctgctggtgctgctgacccgtctggagaaatcgtccagcggccaggcgcgtgatgctgacgagattgatgaagagcagccgcgggtgattgtcgccggctttggccgcttcgggcagatagccggccgtttgctgctctcgagcggggtgaagatggtgatcctcgatcacgatccggaccatgtcgataccctgcgcaaatttgatatgaaggttttctacggcgatgccacccgggtcgatctgctggagtcggccggcgccgaaaaggcggaagtgctgatcaatgccattgacgatccgcacgtcagcctggagctggtggcgagggtaaaagagcattttccgcatctgcagatcatctcccgcgcccgcgatgtcgatcattacattcagctgcgccaggctggcgtcgaggccccggagcgtgaaaccttcgaggcggcgctgaagtccggccgaatgacgctggaggcgctggggctcggcgcctatgaagcgcgcgagcgggccgatctgttccgtcgattcaacctgcagatggtcgaagagatggtggcgatggcggaaaacgatgccgcgtcgcgggtggcggtcttcaagcggaccagcgatatgctgaccggcatcatcaacgaagatcgtcatcatctgtcgctggtgcagcgtcatggctggcagggtacggaagagggcaggcacaccggggatatcgccgatgagccggaaaataagccctcagcctgaggctgaccagtaacattttgttttcgtttggatcctcttctggcggcccacggtgtgaacgtgggcttgccagcaaatcagaaaattttcttattctttaccctccggccagtcgacgaagttgtacgctttccgtatagtggcgacaattttttgcactcgggaatgaatgaatgatcagtctgattgcggcgttagcggtagatcgcgtcattggtatggaaaacgccatgccatggaacctgcctgccgatctcgcctggttcaaacgcaacacgttaaataagccggtggtgatggggcgtctgacctgggaatccattgggcgcccattgccggggcgtaaaaatatcgtgatcagcagcaaacccggcagcgacgatcgcgtgcagtgggtctcctccgtagaagaagcaattgccgcctgcggcgatgtggaagagattatggtgatcggcggcggccgggtgtatgagcagttcctgccgaaagcgcagaagctctacttgacccatattgatgcggaagtggaaggcgatacccatttcccggattacgatccggacgaatgggagtcggtgttcagcgagtttcatgacgccgacgcgcagaactcccatagctactgctttgagatcctcgaacgccgttaagcgggcaggatagcgataaaaaaaccccggtcgcgtctggcgtgaccggggttttcttttgcatgaattgcgcgacgatggcgcactcagtatctcgtcatgtttcccgtcgcgggcttcgtcttctttctgaagcgctccccggggcgacaaatagcacttaaacgtaggtcgggtaaggcgttagccgtcacccgacacaaaagtggctccgcgcccgcagttcttgcccggcggcgctgcgcttgcgcgggcctacgggactgcgtcatgtttcccgtcgcgggcttcgtcttcctggagtgctgcccgggctacaaatggcaaggaaatgtaggtcgggtaaggcgttagccgccacccgacaaaacgacgccgcaggtagcccggataaggcgcaacgcgccgctatccgggaagagtcaggacgcgacggcttcgccttcgtcgaggcttttctgccggtttgacggctcggtgaagtactgcttatcttcccagcgcaggcaggtgagttccccgccccagcagcagccggtatccagggcgtaaatcccctccggcgtgccgcgtccctccagcgaagcccagtggccaaaggcaatgctgtaggcattgctgaccgggccgggaatggcaaaccacggcttcagcggcgccggggcgtcctcgggcgcttccttcgaatacatatccagctggccgttcgggaaacagtagcgcatgcgggtaaaggcgttagagataaagcgcaggcgcgccaggccgctcagttcgttgctccagtggttcggcatgtcgccgtacatggcatcgaggaagaaaggataggagtcgctggagagcactgcttcaacatcacgcgcgcactgctgggcggtctccagatcccactgcggcgtaatgccggcatgggccatcaccagctttttctcttcatccacctgcagcagcggctggcgacgcagccagttgagcagctcatcggcatccggcgcttccagcagtggtttcagacgatcctttggcttgttgcggctgataccggcaaagaccgccagcaggtgtaagtcatggttgcccagcaccagtcgaacgctgtcgcccagagatttgacatagcgcaggacctccagcgatcccgggcctcgggccaccagatcgccggtcagccacagcgtatctctccgcggatcgaattcaacctgcgctaataatgcgatcagttcatcgtagcaaccatgaacgtcgccaataaggtatgttgacattgttttaatgaatgagcgttggaactgcgagacggaaaacagggatctcaatacggaacggcgcgccgtcgatatcgatcatctcataatgaccctgcatggttcccagcggcgtttcaatcactgcgccgctggtatattgatattcaccgccggcgggaatatgcggttgctcgccgaccaccccttcaccctgaacttcagtctcacgaccgtggccgttagtgatgagccagtagcggccaagcagctgaacctgactccgccccaggttgcgaatggtgacggtgtaagcgaagacgtagcgctcttcttccggggaagactgcgattcgatatagacgctctgtacctggacacacacccggggcgaatgaatcatggttagctctccttcgttggcagattgtcagacagccagttggccatcaggcagtactgcgccacggaaatattttcggcgcgcatggccgggtcgatgcccagctcggtcagcacttccacgctgaacagattgccgagactgttgcggatagtcttgcggcgctggttgaacgcttcggtggtgatgcggctcagcacccggatctctttgaccggatacggcatggtgctgtgcggcaccaggcgtaccaccgcggagtcgaccttaggcggcggggtaaacgcgctcggcggcacttcgagtaccgggatcacctggcaataatattgcgccatcacgcttaaccgaccatacgccttactgttcggtccggcaaccagacgattcactacttccttctgcagcataaagtgcatatcggcaatggcatcagtatagctgaacagatggaacatcagcggggtcgagatattgtacggcaggttgccgaagacgcgcagcggctggcccattttctccgccagttcgccaaagttcatggtcatcgcatcctgctgatagatggtcagctttggaccgaggaacggatgcgtctgcaggcgagccgccagatcgcggtccagttcgatgacggtcagctggtcaaggcgttcgccgaccggctcggtcagggccgctaggccggggccgatttcaaccatcgcctggcctttctgcgggttaatcgccgagacgatgctgtcgatcacaaactgatcgttgaggaagttctgcccgaagcgtttacgggctaaatggccctgatggactcgattattcattgggtattaacaatcattttgatggcgagattaagcgccgtgataaaactgccgacgtccgctttcccctgacccgctaattccagtgcggtgccgtggtcgacggaggtacgaataaaaggtaaaccgagcgtaatgttcacgccgcggccaaagccctggtattttagcacgggcaggccctgatcgtggtacatcgcgagtaccgcatcggcatgatcaagatatttcggctgaaagagggtgtctgccggcagcggaccgctgaggttcatcccctttgcgcgcatctcttccagcaccggaatgatggtgtctatctcttctgttcccatatggccgccttcgccagcgtgcgggttaagcccgcaaaccagcacatgcggctgggcaatgccaaatttcgtgcgcaggtcgtgatcgagaatggtgatgatctcgcgcagtagctcgggggtaatcgcttcgctgatggctttcaacggcagatgggtggtgaccagcgccacccgcagctcctcggtcgccaacatcatcaccactttgctggccttcgcgcgctcttcaaagaactcggtatgaccggtaaaggcgataccggcgtcgttgatgttgcctttatgcaccgggccggtcactaacgccgcaaactcgccgctaaggcagccgtcgcaggcgcgcgccagcgtctccactacgtaggcgccgttttgcacattcagcacgccgggctccgccgggacgtttagcggcacgttcagcagcgtcagggtaccggcgcgctgaggaacaggaggttgcgcgggatcgtaagggaggagagataaaggaagaccgagccgcttggctcggtcagttaacagggcgccatcggcgcaaatcaccagctcaactggccagtcgcgctgggcaagctgcacgaccaggtcagggccaatcccggcgggttcgccgggagtgataacaactttacgggtttcaggcatcgatattagttgctcagaattttaacatacgcactggcgcgctgttcctgcatccaggttgccgcttcttcagagaatttgcggttcatcagcatgcggtaagcacgatctttctgcgcggcgtcggttctgtcgacctgacggctatccagcagttcgatcagatgccagccaaaggaagagtgcaccggtccgctggtctgacctttgttcagacgcatcagcgcatcgcggaacgccgggtcaaagatgtccggcgtggcccagcctaaatcaccgccctggtttgccgagcccggatcttccgaataggttttcgccgcttgagcaaacgtgattttcccgctcttaatctcggctgcgatctgttccagcttagcctgagcctgggcgtcgttcatgatcggcgacggtttcagcagaatatgacgggcgtgaacctcggtaacggagatattctgggtaccaccgcgcaggtcgttgactttcagaatgtggaaaccaacgccggaacgaatcggaccgacgatatcccctttcttcgcggtgcttaacgcctgagcgaaaatgcccggcagctcctggatacgcccccagcccatctggccacccttcagcgcctgttggtcagcggagtaggtgatcgccagtttgccgaagttggcgccgttgcgcgcctgctcaacgatggagtttgcttgctcctgggccgcggcgacttcatcagaggtcgggttctccggcaacgggatcaggatgtggctcaggttgagctcggtgctggcgtcgttctggtcgccgatctgtttcgccagcgcttccacttcctgcggcagcacggtgatgcgacgacggacttcattgttacgcacttccgaaatcagcatctctttacggatctggttacggtaggtgttgtagttgatgccttcataggccagacggctgcgcatctgatccaaggtcatattattttgtttggcgatgttggcgatagcctgatcgagctggtcgtcagagatcttcacgcccatcttctgccccatctgtaacacgatctggtccatgatcagtctttcgaggatttgatggcgcagggtggcgtcatccggcagctgttggccagcctgaccagcattgagcttaaccgattgcatcaaaccatcgacgtcgctttccagcacgacgccattattgacgacggccgctactttatcgaccacctggggggcagcgaaactggtattcgcgatcatggcgataccgagaagcagcgttttccagttcttcatactttttccatttcgattaaccgcaaatgcggatgatgttgtaaaccagccgcatcacagggagctctggtacggtaaaatgttcgagcgcagcatctgctgggtgccgaggccgtagttagagctcagaccgcgcaattcgatattgattccgaaggtgttatcgtatttgctctcgccgccgttgtcgttgctgttccagccgttgactttacgttcgtagccaagacggatggcgtagcagcaggagttatactgcacacccaacatctggtttgctgctttccgggtattagtatcgtagtagtaggccccgaccacggaccagcgatcgacaatcggccaactggcggtcatccccacctgcgaaataccctgtttatattgtgccgcggtggaatatgacggcagcgtggcctgaatatattccgggctggcgtaacgatagttaagctgaactaagcggttctcatcgcgacggtattcaatggtgccgttaccagtggcaacgttatccagacgcgtatcgtactggatccctccgcgcagaccccattcatcggcaatgcgccagtaggtatcgccggcccagaccagtgaacccgtggtatcgttgttctcccagttgatgttgtcatcaccggtgcgtgactcggtgaaatagtagatttgaccaacggaaatattaaaacgttccaccgcggcggcatcatacacgcgcgaggtgagcccggtggtgacctgattagccgacgcgatgcggtccagaccgctataggtacggtcgcggaacagaccggtgtaatccgactgcaacagcgtggagtcgtagttgccgatttcactctgatcgcggtacggcacgtacagatactgcacgcgcggttccagcgtttgggtgaatccctcctgcaggtcgcgttcaaagaccattttgccgtcgactttaaactgcggcattacgcggctgacggactctttatagtcagtgccgttggcggcattgtacttatcgaggttgctctgctggtagtgagtcgccagcagcttggcttcggtattcagactgccccaaccgttggacagcggcaggttgatcgtcggttcgaagtgaacgcgggtcgcttccggcatgttgttattcgagttaacaaaatgggcaacctgtccatagagatgggtatcgaacggaccgacatcattctggtagtagttgacgtcgagctgcggctcagccgaataggagttgctcgattcgcggtcaaagacctggaactgtttggtcgataccgtggcgtcaaagttctggttgacgtaaccggcgctgaatttctgcgtcgcatagccgtcggtactggaaccatatttcgagctgaagtcgttgaagtagtcaggatcgctgaccttggtgtagtcagcgttcagacgccatacctgatcgataacccctgagtggttccagtagaacagccagcggcggctgttgctgtcgctcgagtggtcgtcttcgtagactttatccgacggcaggtagtcgaattcagttaagccgctgccgagctgggtcagatagcggaactcgttttcccacatcacgccgccgcgtttgttcatatagtgcggagtaatggtggcatcgaagtttggcgcgatgttccagtagtacggcagggagaattccacgccgtttttggtgctgtatttcgcgttcgggatcaggaagcctgaacgacgcttatcgcccaccggcagctgcaggtaggggctatagaaaatcggcacagagccaagcttgaagcgggcgttccagatctcggcaacctgctcttcgcgatcgtggataacttcgctgccgacgacgctccaggtgtcggagcccggcagacaggaggtaaagctgccgttttcgagaatggtatagcggttttcaccgcgctgtttcatcaggtcggcggtgccgcgtccctggcgtccgaccatttgataatcgccctgccagacgttggtatctttggtattcagattcgaccaggcttttggccctttgaggatcacctggttatcgtcgtaatgcacgttgcccagcgcgtccaccgtgcgcaccggctgcgcctggcccgcggcctgctgctggtgcagctgaacttcgtcggcgcggaggcgactattcccctggttaatatcgacgttgccggtaaagacggcgttgtccgggtagttgcccttcgcatgatcggcgttaatcgtcaccggcagatcgccaggacgaccttccacgagcggacgatcatagcttggcacgccaagcatacattgcgttgcgagatcggcagcgaggccttgttggctatacaaggcgctggcaatcatcgtagccaggaggctgggaatacgttttttcatacgttgtatttattgttccatcatcttgtgacagcggcttgcaaacggtcagagcctaacttactcaacattatcacgctagtgttaatcctgcccgtttcgagcccgagcgttaggcaccctgttgaatgacgagtatgataaagcaaattataggctatgtcccacaattgaccgaggcgcgagtgccgggtaacgtgcggtcatattcgagcttaacggcgataaacagttggggagtctatgcagtatttgggtaaagtgattggcgtggcagtggctttgctgatgggtggtgggttctggggcgtggtgcttggctttctggtcggccatatgtttgaccgggcgcgcagccgccggttaaatctcttcgccaatcagcaggagcgtcagtcgctcttcttttccaccaccttcgaagtgatggggcacctgaccaaatccaagggccgcgttaccgaagcggatattcatgtcgccaatgtgctaatggatcgcatgaacctgcatggcgcctcgcgcaccgcggcgcagcaggcgtttcgcgacggtaaggccgacaactatcccctgcgcgagaaaatgcgtcagctgcgcagcgtctgctttggccgtttcgatctgattcggatgtttctggaaattcagctgcaggcggcgttcgctgatggcgaactgcatcctaacgaacgtgaagtgctgttcgtcattgccgacgagctcggcatctcccgcgcccagttcgatcaattcctgcggatgatgcagggcggcgcccagtttggcggcggttcgcagcagcgctcttatggccaacatggcggcaacgccggctggcagcaggcgcagcgtgggccgaccctcgaagatgcctgcaatgtgctgggagtaaaaccgaccgacgacgcggcgacggtgaagcgcgcctatcgcaagctgatgaacgaacatcatccggacaagctggtagcgaaaggtctgccgccggagatgatggagatggccaaacagaaggcccaggagatccagaaggcctgggagctgatcaaagagcagcgcggcttctgacgtttccagcccctcccgtccggcgaggggttttaacttttgaccttagcgcggcgatacagccgccgcggatggccaatttttccgtacagcatctccacttccagaaaaccggtctcaacgccgtgctccagatagcgacgggcggtggttttgctaagcccggcggcgctgaccacttcatcaacggaaaaacagtgcgcttcccggccgctaaacagtccctgcaccagcgccagcgttttctcttcaatccccttgctgccgctatccacgcgatagttcttcgcctgcagttgatagagggaatcgacgttttgctgatcgacgattttccactcccgttgctgatcgtagaactggataaagcgctccagcgactggctcagccgcttccatgataccggcttaaggatatagtcgaaggcgccgttgcggatggcctggctgcaggtttccatatcgctggcggcggtgataaagatcaccgagcattggctggtcgccagcgccgggtcggtcatcagcgtgacgcctttgccgtccggtaaatagttatccagcagcaccagctgcggcggcgtggcgtgaagcagctgccgcgcctgggcgagggaggccgccatgcctgccagccgcagtcgcgggtgtttttgcacaagctcggcgtgcaggcgcgccagttcgctctcatcttcaatgattagcacatcgaccaggtcatgatgcatcgtggacctccggttgcggacaggcgtgcgcgtcggccgggataaatagggtgaagatcgttccccgcggcgcgttatcggcgacttcgatggtgccgcccgcctgagtgacataatgttcaataagatacagaccaatgccgtgatcgccacgggttttggtggtgacgccgcgttcaaaaatgcgctcgcggatatcggggcggatgccgacgccgcggtcggccacttcgataatcaactcccgggcgttgagctggatcaggacttccaccggctcatgcggcagctcggcacgctgcgtggcttcgatggcgttatccagcaggttgccgatgatggagatcagctcggattccatcagcgacggcagggggcggtcgatgcggcaggccgggtcgaagctcagcgccacgcctttttcgcgggcgcgggtggctttgccgagcagcagaccgcatagcgtcggcgagtggaagtgcgaggagataaaatccagtagctcctgagcatgttccgactgggcctgaatatagcggatcgcttcgtcataatggcccatatgcagcaggccggagagggtagtcatccggttgagctgctcgtggcgcatgatgcgcagattgtcgacatagcgcttcacctggctgagctgggcggtgagggcattgatttcgttgcggtcacggaatgtgatcacccagccctgcagggtattctccagcataatgcgcacccgactggcgagcacggtcaactggttgaagcggcacagctcatcgtgggtatcgcgttcgagcatgtcgccgctggcgaaaaagggctgcggcgaaatgacgctgtcgatcgactgaccgcgcagctggcgggcgggctggctgagccccagcaggctgcgggcggcatggtttatcacctcaatacgccgctggcgatcgatgacgatcaccccctcaaagatcgactccatcatcgccttttgctggcgaaccagcaggccaatttcccgcggctcgagcgaaaaaatctgcttcttgatactgcgggtaaagtaccaggagaagataaacagggcgatgagcagcaggacggcggcgataaaaatattgatcactttagtcagagtaatgctgtcgagatagctggtgagatagccgacggagacaataccgatcacacgccctgcgtcatcaacgatgggcgttttgctgcgcagcgagaccccgaggccgcctttgcgaatggtggtgatggattttccttccagtaccgcctggttgtcgccgccgaccagtcgggtgccgacccactccggatggacggaatgaaacagatgaactccctgacggtcgccgatgacgataaagctggcgtcgctatgggcggcgatttgctgcataaacgcctgaatcgcctgtgggtcgtgccggctgacctgttgacgtaaattcggcatcagggctatctcttcggcctgtattttggcccgggcgctcatctcctgataaagctggcggctggcgtcaaaataataataaatgcccagtgcgataaaaaggaccgagaaaaaagcgaccagagaaataaacagcttatattgaaaagataatttcataggccccggacgacgtattaaccataccggcactctatcatttttctgtcacgtgacgtaaatgttaagggaaagttgtgatcagcggcgcaggcgcgggctgccgccagcggtcgcggcggaaataggcggccggcgggaaataaaaaccataaaaaccacagtcataaatcagagatatatcactcccgggcagttcagcgaatagaaaccataaaaaccatagtgaccattaaaacttcttttttaatctgggaagcttcacattaacgacgccgctgtccctttacgctgaaaatgaataataacgacagggctgaatttatgagcaccacagacaatgcattctctgcaacccttgaaccgatcgatacgccgaaaaccacgctcaagcagcgctggtggcatatcatggataactggaaggtggggatcgtcccgctgccgctgtttctgctggccggaggactgattgccctcgactgccttggcggcaaactgccgagcgatatcgtggtgatggtggccaccctggctttctttggcttcgcctgcggcgagtttggtaaacgcctcccggtgctggggaaactcggtgcggcggcgatctgcgccacctttattccttccgcgctggtccactatggtctgctgcctgacgtggttattgaatccacgaccaaattctataaatccactaacattctctatctctatatctgctgcatcattgtcggcagcatcatgagtatgaaccgcaccacgctgattcagggctttctgaagatcttcttcccgatgctgtgcggcgaagtggtcggcatgctggtgggcatcggcgtcggcacgctgctgggcatggagccgttccaggtgttcttctttatcgtgctgccgattatggccggcggcgtgggagagggggcgatcccgctgtcaatgggttatgccgcgctgatgcatatggagcagggcgtggccctgggccgggtattgccgatggtgatgcttggcagcctgacggcgatcgtcatctccggctgcctcaaccagctcggcaagcgcttcccgcatctgaccggcgaagggcaactgatgccgaaccgcagccatgaaacccgcagcctcagcgagagcgaaggcgtgagcggtaagaccgacgttgggaccctcgcctccggcgcgctgctggcggtactgctgtatatggtggggatgctcggccacaaactgattggtctgccggcgccggtaggcatgctgttcctcgcggtgctgttaaagctggctaacgtggtgtctccgcgtctgcaggaggggtcgcagatggtgtataaattcttccgcaccgcggtcacctacccgatcctctttgcggtcggcgtggcgatcactccgtggcaggaactggtaaacgccttcactttaaccaacctgctggtgatcgtcagtaccgtctccgcgctggtggcgaccggtttcctggttggtaaaaagatagggatgcacccgatcgatgtggcgattgtttcctgttgccagagcgggcagggcggcaccggcgatgtggcgatcctgaccgccggcaaccgcatgagcctgatgccgttcgcgcagatcgctacccgcatcggcggggcgataaatgtctcgctggggttgctgttcctcagccactatctggcgtgatataacgctacgctcagcgataaatctgctattttccgctacagaacgccgaaaatatctgcgttctgtatcctaaatgctccgcatttagcgttacaatcagcgcgcgatcggctatcgcaaccatcatcatgacagtccaggcgctgtcgtatttatcatatgtaggagaggaattaatgtcagtggatactcccgcccaggcgggcgtcagcatcgacgcattgctggcggcgaaagagcagcgtgcagcccgccaggccgactggttggcccattatcagcagcctgttatttccctgaccctggtgaccccgggggcggtgaaggacagcattcgctatcgcaatatgatgggcgttgccctccaggcctgcgatcagctgctgtggaagcaccgctggcaaacgctggatcgtcaggtgctatggctgccgaccgggccagaagcgctgtggtgcgtagcgcatccggccagcgaaatcaaagcgatgtgcagtacgctggagcagagccatccgctgggacgcctgtgggatatcgatgtaatctgtccgcagaacgggctggtgggacgccagtcgctgggcgaatcgcagcgccgctgcctgctgtgcgatgagccggcgcacgcctgtgcgcgcagccgtcgtcacgacaccgatctcgtcgtcgcccgcgttgagcagatgattgacgcgtggttcgcccgcgattaatcgggattgttttctgtatcctcactaatccgagttgcacgcagccaacccgcatgcaactcgaagtatgagcgttaaaagtcgatcggcgcgcgaaaggtcatcgcgttgccgtaggcaggatgggtgatggtgagcgtctcggcgtgcagcagcaggcgcggggccatcgccagcgcctccggcgtggcatagaagcggtcgccaaggatcggatgccccagcgccagcatatgcacgcgcagctggtgcgaccgtccggtaatcggcttcaggcgcacgcgggcggtgttatcttctgcgtactccagcacctcatattcggtttgcgccgctttgccggtttcatagcacaccttctgctttggccggttcggccagtcgcaaatcagcggtaaatccacgaggccttccgccggctgcggatggccccagacgcgggcgacgtactgcttcttcggctcgcgctcgcggaactgacgcttcagttcacgctcggcggctttattcagcgccaccacaatcacgccgctggtggccatatccaggcgatgcaccgattcggcctgcgggaagtcgcgctgaatgcgcgtcatcacgctgtctttatgctcctcaagacgaccggggacggacaacaagccgctcggcttgttgaccaccatgatgtgctcatcctgatacaggatcaccagccagggatcctgcggcggattgtagttttccatcgccatgttcgcgttccgttactggtgagtgacgacgatcagacgcagcgcgtccagacgccatccggcctgcgccagcgcatccatcacctgctgacggttgctttcgatcgccgccagttcgtcgtcacggatgttcgggttcaccgccttcagcgcttccagacgcgacagctccgccgtcagcttttcatcggcttcgttacgcgccgcgtcgatcagcccctgcgccgctttggcgatctgcgcttcaccctgctgcagaatcgcatgaacgtcctgctgcaccgcattgaccagcttgctaccggtatggcggttgaccgcgctcagctggcggttgaagctttcgaactccacctgcgcggcgaggttgttgccgtttttatccagcagcatgcgaaccggggtcgccggcaggaagcggttgagctgcagctgcttcggcgcctgcgcttcgacgacatagatcagctccagcagcagggtgccgaccggcagcgccttgttcttcagcagggaaatggtgctgctgccggtatcgccggaaaggatcaggtccagaccgttgcgtatcagcgggtgttcccaggtaataaattgcgcatcttcacgcgacagcgccacgtcacgttcgaaggtgatggtgcaaccgtcttccggcaggcccgggaaatccggcaccagcatatggtcggaaggggtgaggacgatcaggttttcaccgcggtcgtcctggttgatgccgacgatatcgaacaggttcatcgagaaagcgatcaggctggtgtcgtcatcctgctcttcgatgctctccgccagggcctgggctttctcgccgccgttggagtggatctccagcagacggtcgcggccctgctccagctgcgccttcagggcatcatgctgttggcggcaggatttgatcagatcgtcaaagccgtcggtggattccggcgccgcaagatagttgatcagttcatcgtgaacgctgtcgtagacggtgcgaccggtcgggcaggtatgttcgaaggcgtcgagcccttcgtgataccagcgcaccagcaccgactgcgcggttttttccaggtacggaacgtggatctggatatcgtgcgcctggccgatacggtcgagacgaccgatacgctgctccagcagatccgggttaaacggcaggtcgaacatcaccaggttgctggcgaactggaagttgcgtccttcggagccgatctcggagcacagcagcacctgggcgccggtgtcttcttcagcaaaccacgccgcggcgcggtcgcgttcgataatcgacatcccttcatggaacaccgcggcgcggatgccttcgcgctcgcgcagcacctgttccagctgcagggcggtggcggccttagcgcagattaccagcaccttctgcgagcgatggttggtcaggtagcccatcagccactcgacgcgcgggtcgaagttccaccaggtaccggtatcaccttcaaattcctgatagatctgctccggatagagcatgtcgcgcgcgcgctcttccgcggttttgcgcgcgcccataatgccggacactttgatggccgtctggtactgggtcggcagcggcagacgaatggtgtgcagctcgcgtttcgggaaacctttgacgccgttacgggtattacggaacagcacgcggctggtgccgtggcggtccatcagcatcgagatcagctcctggcgcgcggcctgggcatcttcgcgatcgctgttggcggcctgcagcagcggctcgatatcctgctcgccgatcagatcgcccagggtattgagttcgctatcgctcagcttgttgcccgccagcagcagcgcgacggcgtcggccaccggacggtagttctgctgttcttcgacaaactgttcaaaatcgtggaagcggttcggatccaacagacgcaggcgcgcaaaatggctctccattcccagctgttccggcgtcgcggtcagcagcaggatacccggcacgcgctcagccagctgttcaatagcctgatattcacggctcggcgcctcttcgctccacaccaggtggtgcgcttcgtcgaccaccatcaggtcccactcggcgtcgcacaggtgctccaggcgctgcttgctgcgacgcacgaagtctaaagagcagatcaccagctgttcggtttcgaacggattgtaggcatcgtgctgcgcttcggcgtagcgctcgtcgtcgaacagcgagaaacgcaggttgaaacggcgcagcatctccaccagccactggtgctggagggtttccgggaccacgatcagcacgcgctcggcggcgccggagagcagctgctggtgcaggatcatcccggcttcaatggttttacctaagcccacttcatcggccagcaggacgcgcggcgcgtgacgacggcccacatcgtgggcaatatgcagctggtgcgggatcaggctggtgcgctggccgcgcaggccgctccacggcatgcggtactgttcgctctggaacttgcgcgcgcggtagcgcagggcaaagcgatccatgcggtcgatttggccggcgaacaggcggtcctgcggtttgctgaataccagtttgctgtcgagcagcacttcacgcagggtgacgttcgtttcctgggtgtccaggcgggtgccagtgtaggacagcagcccgttctcttcattcactttgtcaacgtggagctgccagccttcatggctggtgatggtgtcgcccgggttaaacattacgcgggtgatcggggaatcgttgcgagagtacagacggttttcgccgatggcggggaaaaggagagtgaccatgcgcgcatccagcgctaccaccgtccctaatcctagttcgctctctgtgtcgctaatccagcgttgaccaagtgtaaaaggcatatatgttcggctctttagttctttaattgcaggcaatagttgatcatctccatgaacaatcggagatgcgtcaaaattggggccaggaatggaaagggcgctatattactggatggcagaacgttcgtcacgttctcctcacgcttcatttttaggctttcgtgcccgtggaatgggtgacaaaaaatcaaaatagccccaactgtcctgtcactattgtagcaaagtcatcattgacgaagggcaggatcccttccgccaccggctgcaactgctttgttaaatagtgatcgtaatcgagcggcgactgctggtaatccaccggctccgggccgctggtggtccagacgtatttgatggtgccgcgctgctgatactgctgcgcccgcccaagcttcaggttgtgttcatcggcaagccgggcggcgcgcacgtgcggcggtacgttgcgctgatactccgccagcggccggcgcaggcgtttgcgataaaccagctgttcgtcgagctcgccgttcatcagcctggcgatagtctcccgcacataatcctgatacggctggttgcggaagatgcgcaggtataactcctgttgaaactgctgggccagcggcgtccagtcggtacgcaccgtttccagccccttaaacaccatgcgctgggcatcgccctcctgaatcatcccggcatagcgcttcttgctgccggtatcggcgccgcggatcgtcggcattaaaaagcggcagaagtgggtttcatactccagctccagggcgctggtaagctggcttttgctaagctcctgcgcccaccaggcgttgacatcgctgaccagctcgcggccgatctccgccgcctgggcttcgctgtgcgggcgcttaagccagacgaaggtggagtcggtatcgccgtagataacgtcatagcctttggcttcaattaacgctttagtctggcgcatgatcgcatggccgcgcatggtgatcgacgaggcgagacgcgggtcgaagaagcggcaggcgctggtccccagcacgccgtaaaaggcgttcataatgatcttcagcgcctgggagagcggcttattgtgctggcgtttggcttcatcccggccgtgccagatctggctgacaatccccggcaggcagtgcttatctcgcgagaagcgggcgccgaggaagccctcgatactgtgctggtcatcgggttgcgccagcccttcaaccaggccgaccggatcgattaaaaaggtacgaataatcgacggatacaggcttttatagtccagcaccagcaccgagtcatacaggccggggcgggagtccatcacgtagccgccggggctcgcctgcggcggtacgtcgccgagattcggcgccacgtagcccaggcggtgcatgcgcgggaaatagagatggctgaaggcggcgaccgagccgccgtggcggtcggcgggcagaccgttgaccgtcgctcgttcgagcaaaaacggcatgatctccgttttgtggaagatccgcgtcaccagctcgcaatcctgcaggttatagatggccagcgccggtttgtcttcatgaaaccggcgatcgatctcatccatccgatcccatgggttgtcgatggctttgccttctcccagcagctcgcgggccaccgcctccagcgaaaaggaggagaaattccagaacgccgattttagcgcgtcgatgccgtcgataatcagccgcccgttggcctgggcgaaaaagacgccgttcttaaagccgtgctcacgccactccagctcgctgttgccgcggccgagccgcagcgggatgcgatagcgttcggcgtgcttttgcagaacgcgcagatcgaactgcactacgttccagccgatcagcacgtcggggtcgtgttcggcaaaccaggcgttaagctcttccagcagcaggggacggctggcgatgaagaccagcacgaagtcgacgtctggcggcgtttccggttcggggcccagcatgtagaccacccgctggccgcagccttccagaccgatgcagtacagctcgccgtggcggctggtttcgatatccagcgacacccatttcagcggcggacgatagtcagggttcggcttcatgcgcgcgttgaccagctgcgagccgcgcgtttcgccttccacccacaccggggcggtgataaagcgctccatcagatagcgctccggcgggcggatatcgccttcgtaaacggtgacgccgctgtcgcggagcatcttctccagacgcatcaactggcgatgggcgcggcagtagaggccaacaatcggctgacggtggaaatctttcagggccagcggggcgaagcggagccctttctccccctgcagcagccgttcagcctgcgcccgctgcgcttcgggaataaaggcgacggactcctgcggcgggagggtgacctgcagcggaccgtcgtcggtggccagccagaaggagagctcggtgccctgcggagtgtcccgccagtgacgggtgagtaaaaatcctgctcgtggctgggtcacgggtattctcgccgataaaaaaccaggcctgattatagcctggtttcatgaggggcgctggggttttatacaggtgttcggcgctaatgttgccccggattgcggcttgcgccttatcccggttaccagatggcgcagagccctggccctgctaagcgcagcgcgagcagggtgattattggccgtagtaggctttggccccatgcttacgcagatagtgcttatccagcagggtctgctgcatagccggcagctgcggcgccagctggcggcagaaaatccccatataggcgatctcttccagcacgatggcgttatgcaccgcgtcttcggcgttcttgccccaggcgaacgggccgtgggaatggaccagcacgccgggcatctgcgccgggtcgattccctgctggcggaaggtttcgacaatcacgttgccggtttcccactcatagtcgccgttgatctccgcatcggtcattaaccgggtgcagggcaccgggccataaaagtagtcggcatgggtagtgccggtcgcgggaatagattgcccggcctgcgcccagatggtggcgtggcgcgaatgggtatgcacaatgccgcccagcgtcgggaaagcctgatacagcaggcgatgggtcggggtatccgacgagggctttttattaccctctaccacttcgccgctctccagactgaccaccaccatatcgtcggcggtcatcacgcggtaatccacgccggagggtttgatcacgaacacccctttctcgcggtcgacggcgctgacgttgccccaggttaaggtcaccagattatgctttggcagagccaggttagcttccagcacctggcgtttaagatcttctaacatagtgtgctccgaatagcaggcgagtcgggtatccctcaccccgaccctctcccggcgggagagggagaaaggcggcatggcgcccggtcggtcccctctccccaacggggggaggggaagggtgaggggacggcctcttagcgttttgaaccgtaatacacttcattccagcgcagcgcgtccttgaaggacggcagacgggtatcgttgtcgatgacggtcagctcgatatcatgcagctcggcgaactggcgcatatcgtcgaggttcagcgcatggctgaagacggtatggtgcgcgccgccggcgatgatccaggcttccgacgcggtacgcagatccggctgcgctttccacagggcgttggccaccggcagcttcggcagatcgtgcggcgttgggacggtttcgatggtattgaccagcagacggaagcggtctcccaggtcgatcaggctggcgacgatcgccgggccggtttgagtattgaagatcaggcgcgctggatccgctttgccgccgatgcccagcggctgaacgtcgaggatcggtttctcggcggtggcgatcgtcgggcacacttccagcatgtgcgagccgagcaccagatcgttaccattgtcgaagtggtaggtgtaatcctccataaaggaggtgccgccctgcagaccagttgacatcaccttcatgatgcgaagcagagcggcggttttccagtcgccctcgccggcaaagccgtagccctgctgcatcaggcgctgtacggcgagacccgggagctgtttcaggccgtggagatcttcaaaggtggtggtaaaggcgtggaaaccgccctgttcgaggaagcgtttcatccccagctcaatgcgcgcggcgtccagcacgttctggcgcttctcgccgtgaacctgcgctgccggggtcagacggtagctgctctcatattcatcgaccagggcgctgatatcgccgtcgctgatgctgttcaccacctgcaccagatcgccgaccgcccaggtgttcaccgagaagccaaacttaatctgcgccgcgactttatcgccgtcggtcaccgccacttcgcgcatgttatcgccgaaacggcacactttcagatgacgggtatcctgtttggagaccgcctgacgcatccagccgccgatacgcaggtgggcctctttatcctgccagtggccggtgaccacgctgtgttgctggcgcatgcgggcgccgatgaagccgaactcgcggccgccgtgcgcggtctggttcaggttcataaagtccatatcgatgctggcccacggcagcgcggcgttgtactgagtatggaactgcagcagcggcttattgaggatggtcaggccgttgatccacatttttgccggcgagaaggtatgcagccagaccactaacccggcgcatttgtcatcgtagttggcgtcgcggcagatatgggtgatctcgtccggggtggtgcccagcggcttaaggaccagtttgcacggcagtttggcttccgcattcaggctgttcaccacatgttcggcatgcttcgtcacctggcgcagggcttccgggccgtacagatgttggctgccaataacgaaccatacttcatagttatcaaaaatcgtcattttcgtatccttaatgggtgagcgctgcctgagattgcggggctttttccgcctttgcagccgaagggagatagtgttgttccgcgctgaccgaccactgctggtagcgctgatagagttgttcgaaacgctgtgcctgcgccggacgcggctgcagggtagtttccacctggcttgccatccgctgttgggcggctggaatatcctcatagacgccggcggcgacggcggcgaagatagccgcccccagcgcgcagcactgatcggaggcgacaatctgcagcggacggttcagtacgtcgcagcaggcctgcatgatgacctggtttttccgcgcgataccgccaagcgccatgacgttgttaaccgggatcccctgctcggtgaagcactccataatggcgcgagcgccgaaggcggtggcggcgatcagaccgccgaacagcgccggcgcgtcggtggccaggttaaggtcggtgatcacccctttcaggcgctggttggcattcggcgtgcggcggccgttgaaccagtcgagcaccaccggcagatgctccagcgatggattgttggcccaggcttcggtgagcgccggcagtaactgtttttggctggctttgatttgctcgcgcaacgccggctgctgctgagccagctgctccagcggccagccgagaatgcggccaaaccaggcgtaaatatcgccgaaggcggactggcctgcctccatgccgataaagtgtggaaccacgctgccgtcgacctggccgcagatgcctttgaccgtgcgctcgccgacgctctctttatcggcgatcagaatgtcgcaggtggaggtgccgatgactttcaccagcgcgttaggctgcgcgccggcgccaacggcgcccatgtggcagtcgaaggcgccgccggagatggccacactctgcgacagacccaggcgctgggcccactctgcgctcagcgtgccgaccggcacatcggccgtccaggtatcggtgaacagcggccaggccagatgctggttgatgatgggatcaagctcatcgaagaagctggccggcggcagaccgccccagctctcatgccacagcgatttatgtccggcgctgcagcggccgcggcgcagatcctgcggacgcgtagtaccggagagcagggcgggcacccagtcgcaaagctctacccacgaggcggctgcctgggcgacggcgctatcttcgcgggtgacgtgaaggattttggcccagaaccattcgctggagtagatcccgccgatatagcgcgagtaatcctctttgcccggctggtgacacaggcgggtgatcgcctcggcttcctcgaccgcggtgtgatccttccacaggacaaacatggcgttagggttgtcagcgaattcttcgcgcagcgccagcacgttgccctcggcatcgacgggagccggagttgagccggtgctgtcgacgccaatgcccacgacgtcggcgcgctgttcggcgctcagcgaagcgagcacgcttttcagcgccgcttccatggactcgatgtaatctcgcgggtgatggcggaagcggttgttagcgccatcgcaatactgtccttcccgccagcgcggataccactccacgctggtcgccagctctgcgccggacgcgcattccaccgccagagcgcggactgagtcactaccaaagtcgaggccaatcgcaattgccatcttgttactccatgcagaaatcattcatgcagcaacagtagatatccccggcaaaatccgtcaggccggattcgctaatcttatggattattttgctgttaccttgcaaagtgtgacgccgtgcaaatattcgatgtggacttttctgccgtatttatagacacttttgttacccggcatatcacggtggaatgcacgctactggcgcttttttcgcttgctgtgcgggtttttcgccaaattcccaccgccgtcgcagtcgcgacagggccgagagcgataaaatgatgaatatggacaattggtgccactgataccttcggggagaaccacgcgtatggccgaaacgcaaaacgatccgctgctgccgggctactcttttaacgctcatctggtcaccggcctgacgccgattgaggcgcagggatacctggatttctttatcgaccgcccgctgggtatgaaaggctatattctcaatctgacgatccgcggcgagggggtgatcaacaaccacggcgaacagtttgtctgccggccgggcgatatgctgctgttcccgcccggggaaattcatcactatggccgccatcccgacgccagcgagtggtatcaccagtgggtctacttccgcccgcgcgcctactggcacgagtggctcaactggccaacgatttttgcccagaccggcttttttcgtccggatgaacagtggcaggcgcgctttggcgagctgttcggccagatcgttgatgccgggcagggggcggggcgctattccgaactgttggcgataaacctgctggaacagctgctgctgcggcgcatggaggcgatcaacgaatcgctgcatccgccgctggacaaccgggtgcgcgacgcctgccagtacatcagcgaccatctggcggacagccattttgatatcgccagcgtcgcccagcacgtctgcctgtcgccctcgcgtctgtcgcacctgttccgccagcagctgggggtcagcgtcctcggctggcgggaggatcagcgcatcagccaggccaaactgttgctcagcaccacgcggatgccgatcgccaccgttgggcgcaacgtcggcttcgaagatcagctctatttttcccgcgtgtttaaaaaatgcaccggggccagcccgagcgaattccgcgcgggttgtgaataaaaagtaaagaaagtgaaatgatgacccgcttaaatgtcacagccagtaaactattaagacaattgatggcttgacgacggcgcgatggcttcggagaatccgggcttcgttttttaaccgggtacattatgcaagcattgctcgaacactttattacccaatccacggtctactcattgttagccgtgatgctggtggcctttctcgagtcgctggcgctggtggggcttatcttacccggcacggtgatgatggctggccttggggcgctcatcggcggcggcgaagttaacttctggcaggcgtggctggcggggattgtcggctgcctgctgggcgactggatctcattctggctcggctggcgctttaagaagccgttgcaccgctggtcgtttatgaagaaaaaccgcgccctgctggagaaaaccgagcatgcgctgcatcagcacagcatgatcaccattctgattggccgctttgtcggaccgacgcgtccgctggtgccaatggtcgccgggatgctcgacctgccggtggccaagttcgtgctaccgaatattatcggctgcctgctctggccgccgctctatttccttccgggcatcctcgccggggcggcgattgatattccggctgatgaaaacagcaccagctttaaatggctgctattgggggcggcgctgctggcctggctggcgggatggctgtgctggcggctgtggcggagcgcgaaaacctcaggcgatcggctgacccgctggctgccgcgcggccgactgctgtggctgtcgccgctgatggtcgcgctggcggctacagcgttaacatttgtcttccgccatccgctgatgccggtctatctggcgatcctgcacaaagtcatcgcgcgctgatccccatcaaatgcgaggcgctgctgtggccgcttaacagctcggcggtggcgccatcccagacaatgcgcccttcggcgaccaccatcgagcgcggcgcgatacgcgcggcgtcctctacgctgtgggagaccatcagcagggtgagctgctgctgctcgcagacatcggcgaccagggacagcatctcctggcgcagcgccggatcgagcgccgagaagggttcatccagcagcagcaccggctgctggcgcaccagacagcgggccagcgccgcgcgctgccgctgaccgccggagagctcgccgggcagacgttccagcagcgcatcaattcccatctgtccagctatcgccgtgacctgcgcctgctgctcgcggttcagtttaaggcctgggtggatgccgaggctgatattttgtcgaatggtcagatggttaaacaggttattctcctgaaacaacatcgagaccggacgctgcgccggcggcgtcgcgttatgcacctcgccgttaatcagcaggctgccgctggcgggtggcagaaacccggcgatcagattcagcagggtgctctttccggcgccgctgggaccgagcaccgcgatgcgctccccgcgcgcgacgtcgagggtgaagcgcatcggcagatgctggtatagccaggtcacatcattgagttttagcatcacgccccggaagtttttcaatcagcgtaaacaacaagaaacagagtagcagcaggagcagggcggtgacggccccgtcctggctgcggtaggcgcctatctgctggtacagatagaaaggcagggtgcggaacgcctcgttgccgaacagcgccaccacgccgaaatcgccaatcgacagtacgcaggcgaaggcgagcgcctgggccagcgggcgccggagagcgcgaagctcgaccacccgcagccgggcaaagccttcaatacccagcgactggcacagcatgctgtagcgggcggcaatgtcgcgcatcgggttttccagtactttcagcgcataggggatcgccatcagggcattagtgaagatgacgatgccgtcggcggactccggcaggccgatagtgttattgagcagcaggaagaagccggtcgccagcacaattcccggcatcgcaaggatcagcatgccgctcagctccattgcctgcccggccaacggccgctggcgagcgcgcagctcccggctgctccataacagcattatcgtcagggtcacgctcaatagcccggcggcgatggcgatgcgtagagaggtgctcaatgcctgccagagcgctggctgcgccagcacgtccagcatattacggttgatcccgtcgacgatgaccgccagcagcggcgggagcagcagcagcagggcggcgccgatcagcaacccgtcgctcaggcggctatgcaggcgatcgtcagggtcgcgccagccgcgcacatggctgacgccgatggcgacggctttactcagacgctggctaagcagcaccagcccaaggcagcagagcatctggatcagcgccagcattgccgctcgcgccggatcgtagtcaaagctcagcgcctggtagatagccaactcgatcgtggtggctttcgggccgccgcccagcgagagcacggtggcgaagctggcgaagcagagcataaaaatcagcgcggcgacggcgggaatgtgccggcgcagccacggccattcgacgaggcggaagaaggcatagccgcgcatgccaagctgggcggcaatttgccgctgctcgccgggaatgttctccagcgcctgcagcagcaggcgggtcgccatcggcatattgaaaaagacgtgcgccagcaggatgccctgcagaccgtagggcgagaactcccattgccagccgagcgcgttaaatagtgaggccagccagccctggcggccatagacgctgaggataccgaacaccgccaccagcaccggcaggatcagggtcatcgcgcacaggcgcagcagcagcgtacggcccgggaagcgacgccggtaaagcgcgcgggcgagaaagatggctggtcccaccgagatcagcgctgacagcgacgcctgccagaaggagaagcggaccacatgccacaggtagctatcgctgaagaccgattgccagcccgcgccgggggcgctaaaccacagcgccagaaacgccgccagcgcgacagcgcacagcagcgtagcggcgaacaggcccggcatcagcccgcgaaggtttagcggctgacggcgcgttgccatgcgctaatccaggtttgacgctcgctggcgacctgctgcggggtaaaggacagggtggtctgcggcttcaccagggtatcaaacccggccggcagggtgacctgggtcaccggatacatccagttgctggtagggatggcgttctggaagccaggagataccataaatttgaggaatttttccgccagttccggctgcttgctggcggcggtacgcgcggcaacttcgacctgcagatagtggccctcggcgaagctcgccgccgcatagttgtctttcttctcttcaatcatgtggtaggccggcgaggtggtatagctcaacaccaggtcgctttcccctttcaggaacaggccataggcttcgctccagcctttggtgacggtaacggttttcgcggccagcttctgccaggcctcgggcgcttgatcgccatagaccttttgcatccacagcagcaggcccagtcccggggtgctggtacgcggatcttcatagatgacccgccatttttgcaggccctcgaccagctctttcaggctcttcggtggattagccagtttgtttttgtcatagacgaaggcgaaatagccgtagtcgtagggaacaaaggtgtcattatcccagccgcccggcacgctgaccgcgctggcgggtacgttgcttttggcaaacagtttactctgcgccgcggcttccagcaggttgttatcaaggccaagcacaacgtcggccttgctgtttttgccttccatgcgcaggcgattcagtagcgaaacgccatcttccagcgcgacgaacttcagctcgcagccgcactccgcttcaaaggcttttttgaccgccgggccggggccccagtcggcagagaaggagtcataggtatagacggtaagaacaggcttagccaaagcgggcatggcgaccagcgccagcagcgggagtaattttttcaacactttgcacctcagaaaaaaggggtggcaaaggattttgagtgagcctcaaatcccttcgccggcgttatccggatcaggttcgacgggtattttctcagcccatgcgcttcatccttcaagccgcatctgcgttagcttcgtgcgttcaccccagtcacatagttatctatgctccaggggattcacccgcttgctgccttgatgcaacttgaatgatattgcgtatgtttattagcaccccgttgagaacggccttagtgtaatgattttgtcagatgacggaaagcgcttacggctccggcggcgcaaaccatgcggatttaaaatcgaaccagccgagggtattcatcctcacgccgcgcatactgcgctgaccctgaatcatcagccagtggtggatcagcggcacgatatgttgcccggccagcagccgctggctccaggtggccggattaaactctcctgctcgccagcggcaggcgtctgcctgccagtcaatggggatgcagcgctgaatcagcgggacttcgtacagataggcgaagagcgaaaattcgatcggtaaggtgaagttcacgctgttgagccagatatcgctgaccacctcgccgcgatgccaggcatcgtactccagctcctggatctccagctttacctgatgcgccgtcagcaggtcgcgcatgatcccgccgatcacccgatgttcgacgtgatcgcggtagtaggtaagggtgactgtctccagccccgccggcttctcgcaggcgtggttgctggcgtgatgccagcgcggcagcaggccgtaggcgggaaaccagttgccctggtagtgttcgcccgcatggtagagcaggttggcgggctgaaacagatagcttagccagcggcgcaccgcgtcgttggcccccagcgggcttcgcgagtcgaacagcaggtaatagcagccctcttccaggcgactctccaccgctttttcgctttcggtattgccctgcagcgtcaggccgccgttgggctcttcgctaatctccggcagcacccagacgttcacctcatcgatcagcgcccggtagccaaaatagtcctcaaaggcatggatcttgagctgattctggttgttacgcaccacggcataggggccggtgccgaccggcatggaggaaaagtggttcatggtctgccactcctgcggcagcaccatcgccggcacctgccccagcagccagggcagccagcggtcgggctggcgcagatgaatatccagggtccaggcggtgggcgattcgatgcgttcgatatgtgtatagagcggtagggcattgctgcgctgcagagaggcgatcacatccgccatctccagctcacggccatggtgaaaatggatgccgggacggaggaaaaagcgccagtgggtgggggtcagctgctgccagtggtgggcaatatcggcttccagttccccattttcctcatttacccgcgtcagggcgctgaatatttgccgggcaatatgcgtttccgaacgccgcagcgcgctaccgggcagcaaattcttcatcggacgatagtagagcacgcgcaggatgtgccgcccctggcggaagctgcggccgagatgcgagaccagcatctggcggacggcagccttatcgccgaccaactgcaccagctgatcgatgcgatcctgctcaaggagatcttcggcacgttgctgctgcagggcgaggccggtatagagaaaggttagccgcgaacgcttgccgcggcctgcctccgcttcccaggtcagccagccgcgggactccatcatattgagcagggtgcgcatatggcggcgcgagcagctcagcatttccgccagctcgttaagggtggtctcctgcgacttgccgtcgcagcactgccataggcgaatgaactgttgttgcagacggccggaagacataaaaggggaactcctgcgcaaaactcagcaatttattacttcctatattaagccaataatgaatcccgatgaagcgaggaggtgaatatgatgaggtctaccgcaaaatcgttctaccaacgctacttttctgcgacgcaggaagcgtcctggctggcccgcctgatggcaggacgacagcaggaaattctgggggaactgatgcagtggggagtgacgtcaacgacctctgatcattgacttgcagacatcatgtgtgactgagtattggtgttatactcgtcgtttttcaaactgcaggtgcgctgtcgatgtttcctgggccgtatgttctggctgcgtgattcgcctctacgggactcaccttttcagggtcagcgcgagcgcggcgcaaaatggttaaccgttttgtcctgcagcatgaaatccatagagtatagaatcacccgccagcagaatgcctctgctggcttttttcgttttcttcgcgtgtgttaaggacattccatgctgtggttgatgacgatgggacgacggcttaacggcgtctatgccgcctttatgctggttgcttttatgatgggcgtggcgggcgcgttgcaggcgccgacgttgagtttgtttcttagccgcgaagtgggggcgcaaccgttctgggtgggcctgttctataccgtaaacgccatcgccgggatcctggttagcctgtggctggccaagcgctccgatagccgcggcgaccggcggcggttgattatgttctgctgtctgatggcggtgggtaatgcgctgctgtttgccttcaaccgccactatctgacgctgatcacctgcggcgtgatgctggcatccattgccaacgccgccatgccgcagctcttcgcgctggcgcgggagtacgccgacagctcggcgcgggaagtggtgatgttcagctcggtcatgcgcgcccagctgtcgctggcttgggtgattggcccgccgctggcctttatgctggcgctcaactatggcttcaccaccatgttctccattgcggcgggcatttttgtcattagcctcgctctgattgccatcaaactgccttcggttccgcgtgtggaacagccctcggaggaggcggcggcgctagcgcaggccggcggctggcaggacaagaacgtgcgtatgctgtttatcgcctccaccctgatgtggacctgcaacaccatgtacatcattgatatgccgctgtggatcagcagcgatctcgggcttcccgacagcctggccgggatcctgatgggcactgccgccgggctggagataccggcgatgatcctcgccggctactacgtaaagcgctttggcaaacgtaaaatgatggtggcggcggtggccgccggcgtgctgttttatgccggactgatcctgtttcatggtcgcacggcgctgctggctctgcagctgttcaatgccatctttatcggcattatcgccgggataggcatgctgtggttccaggatttaatgccgggacgggcgggagcggcgaccaccctgttcaccaacagtatttccaccggcgtgatccttgccggcgtgatgcagggggcgctgtcccagagctatggtcacgccagcgtctactggacgatcgcggccatttcgctggtgacgctgtttttgaccagcaaggtgaaggatatctgactactcgccccggcatcgccggggcgaccaggcctacttgagttcgatacgcttaatgtcgccgatgataaaaatgtaggcaatcaccccaatcagcgccgtcaggccgacgtagatcagcgcgtaaaagaaattacccgtggcggaaataatcacaccaattatcagtggtgcgataatcgaggccatattggcacagaaattaaatatgccgccggtgaggcctgccatattttccggggcaatatcagaaattaaggtccagcccagaccgaccatcccctggccaaaaaaagccaccgacatgataataattacggtgctattggcgcttacccaattcgccgcgataatacagctggacagcaataaaccggaaattattggtaactttcgactgatgttgacggagccggttcgcttcaacaaccggtcggagatccagccgccgaagaggatgccaatcgcggcggcaaggaagggccaggtggcgaagaagccgacgtgcagccatggaagatggcgctcgttggcgaggtagctgggaaaccacgtcaggaaaaagaccagtgtggtgttgccggcgaactgacccaggctggcgccgaggatctggcgacagcccagcaggcgtctggcgtcacgccagttaaatggaacgttctggattttattgttaatgctgtttgcgccgatatactccagctccgcttgattagccgtgtgcgattcatgcggttcatgataaaaacgccaccacactaaagtaaataaaatacctaatccgccggtgaggaaaaaaagcgttctccagccatgatgttcgagaattaaaaataacagcggcgagaaagcggccagccctatatattcaccaactgtatacgttgccgttgcccgcgcgcgctcatgctgagggaaccaggtgctgacgatgcggctgttggccggaaagcagggcgcttcgctgacgccgagtcccaggcgcagaagcagcagggattttaggccgagggtgaaactttgcagcagggtaaacagcgaccagaagaaaattgacagggcataggtcagtttgttgccaaagcggtctaaaaacatcccgccggggatctgcgccagcgcataagtccaggcgaaggcggagaagatgatgcccatcatcgccggatcgatatggatttctttgcttaactgtggcgctacaatacccaggatggtacggtcgagataattgatcatcgttccgacggagagtagcagcagaataactatccgtacgcggcttctttttttcgcccccgatgtggaagtgaggacttcctgagagtttgacatactcatagcgagttcctttaaagtttaaaatatttttgcatatattctaatatgcaaaaatatctcaaggagctataggtagtatctatgaatggcaatgccttgtggcacattcatgcccttcgtcaaataatatttgatgtaacgccgatatttacccgttcatgcgcattattggtggcttgcatggtatattagcgtcagtgcatttattcttatattatacgggtaaaaataatgaacctaaagcaactttattattttaaacgtctgtctgaaactgagcattacaccgaagccgcctccagtctgtgcatcacccagccctcgctaagccacgcgatatcggagctggagaaggagttaggggtcgcgctattcgccagacaggggcggaacgtaaaaattacccaaaacggcaagcgttttttgccgtatgttgaagatgcgctggcctcgctggagaacggacgcatgatattgcaaaaaaatggcgctgagaataaagagaatattcgcatcgcctttatttacacgatgggggagtatgttgttccacagttaattaataaatattctctttcacctgaatgtcacaatgtgactttttcttttactcaagggacatcgctgacgctgttgcaggagctgaaggccggaaaagtcgatctggcgatctgctcttatattgccgatgaacccgatatcgattttattccggtgatccagcaggaactggtggtggtcacggcaaaggatcatccgctggcccggctatatgaacatgaagtcgatctggtggagacgattcattatccgtatatctatttttcagaaaatagcggcttacgtccgtttatcgataatgtatttatgcagcaaaagctggtgccggagatcgcctgctatgtggatgaggatacggcgatggccgggctggtgagtattgactacgggatcgcgattatgccgcgcatcaccgcgctctcctattacaacgtccatatcctgaagattaaaaacaccatccccccccgctatatctatctggcgaccatgaaagacaaggggctctctccggcgctggagtcatttaaaaatgtggttatccacgatagccagaagatctgttaacggatggcccggatgtgacctccgggccatccggatatcaggagagaatatccatcacttcacgcagcttagcgatggcgatctgccccggcgcggaggcctgaccaacggtaccgaaggtcatcgccgaaccgaacaagcgcccggtgacccggctaacgccaccggatttgcccatcgacatggtgatcagcggacgcgtcgcatacttctctttcatggtcagcgtggcggcgagcaaggtgagtacgtcctgcggcgactgcggcatcaccgcgatcttcggcagatcggcccccagatcctgcatgcggcgcaggcgatagataatatcttcctgagcgggggtcttatggaaatcatgattactcatgatcaccttgacgcccgcggcatgcgcatcgtcaaccagcgcgcggatctgcgcttcatcattgaacagttcgatatcgataacatcaaccagtccactgcgtgcggcctcgcggttgagcgcaaaataggcttcgtcgctgagctcggtttcgccaccttctttcttactgcggaaggtaaacagcagcggaagcgctttcagcgcgccacggatttccgccagcgcggccatcacctgggccatctctctgacctgggcaaagtggtcaacgcgccattcgataatatcagcgccggcatcgaccaggccgtgggcgttacccagtatctcatccagggttttaccgatcagcggtacacaaatgagggtttccccttcctgaaaggtgatgttctttacggttactgcatttgtcatgtaggtatccattatttttcgcgttgtacttcaggcggtgactgcggtgcgtgacactttttgcgccgcccgagcctgcagttgacgatagccgatgtacagggcgatcacaaagccgataacggcgatcagaaaatcaaaccacataatgctggcaatactgatctgcgaaagctttgcggtgatcaacgggatcgtgaagctggcgatactgccggcagtgtagaagatgccggttgctttgccttttccgttcgggaagctcatcgccatgattgtcgcacccagctgcagcactccgccagcggcggcaaagccgatgacaaaagcaaagccggtcaccatcatcggcgtcgggaacaggcacaccaacagcagcgaaatcatcgacaggccagtataaataatcatcgcaatggccgagctaaacacctctttgacgaaggcggcagttacaaagacgcagaccagcgagccgacggtatagatgctaagcagtttaatcgccgaggcatagggcaggccgacgacgaactggccgtactgcgccagccattggctgaccagatagaaggtcgccatgccgatataaccgtacagggtgaagatcaccatatccagcttattagcctgtggccggacggctgtttccgcctgtgccgtaggggcttcctcttttttcgccgcctggctgtcagggaacggcattttaagcagataaatcccgctcagtacaaagagcgctgccgcaatcacgaacgaccagccgaaccacagatttgcccatatcaggaagctgataatgaacggcaacaggaactgccctgcagagacgaaggctttgatcagcacgttggcccggctggcagagtgcgggaaagattccatcagcgccggataggtaccggagtcgaggaagctgttcgccaggcccgccataatgccgaacacgtaagccagatagatatttttggtcagcaggatgccgacgaaaaagatcaggtagctcaggatcccaagatagataaagggcttgcgaccgaagcgatccgagagaaatccggtcacgatggtcgctaacttaccaatacctaacgaagatataacgatcgatacgccggctttgtctgttccccactgttcctgaagatgggccatgttgagggtgattaacagcacccccataccgtggatcaggtagttgagatacagccctgccgcagtagggatgtatttatttttcatcattcgcctcttagaacagaatgctcttgatgtaatcaaccggcatctgtttgcccgtccagatttcgaacgcgcgcgcgccttgccacagcatcatccccaggccgttcagcgtgcggcagccttttttctcggccacttccagcaggtgggttttgcgcgggttgtagacgacgtcggagacgatcaggtccggacgcaggaagctgtcgtcaggtagcagcatctggccttcgaacggcttcatgccgaccccggtggcattggtcaggatcacgctgctgtcaatttcggcgcgcagtttgtcatgatcgtcgagatcgaacagatggatctcgcagtcggtgttgtggcggatcttggccacggtttcttctgcgttggcgaagaatttatcgcggcggttgaagatggagatcgccttcacgccatccagtgctgcctggacgcagagcgccgttgccgcgccgccggcgccgagtacggtcatcttcttgccgatgatatcgataccggcttcgctaagggcgcgcatgtagccggtgccatcggtgatatgtccggtcagtacgccgtcgtcgttgaccacggtattgaccgccccgaccagctgtgccgccggcgacagtttatcgagatactggcaaatctcggttttgttcggcatagagacgttaaagccgcgcagcttcatcgcccggaagccctgcaccacgtcttttagctcctggttaccgacttcaaaaacgagatagacgtagtccagcccgagatgggcgaaagcctcgttgtgcatggtgggcgacatgctgtgacgaatcggggtggcgatcagcccaatcagctcagtgtgtccagtaatacgttctgccatgacaaaaatcctcaataagttagaaagggaattcgttgtgcttcgcggctgcccagcgcacccatgtcttccagtgcatccagtacgttgcggccttcgcggacgccatcgataatgcgtcgcgccatcacgctgtcgccgatgttcatgattttgacgttattggcattggcccagcgctcgatctcgtcgagacccgtccggttggcgcgcatccccagacagacaaagccgtagtcgaagggaatatcgaaggtttgctgtgtatttttcacctggaaatggtcggcagcgaccgccatcagttgggtattcatgtgctgttcgacctggtgctcgtcgagcatggtcaacatggcatttttggtaatgatgtcgagatcgcgaccggcggcgtcctgcatctcgattagcaccgcctgtgcgccgcgagcggtaaagtattcgataacgtcaaggccaacggcgccggcgccgactacggcgatgcgtttgcccttgatatcggtaaatttcgccagattgtcgatcatgccggtaatggaaaagatcttgccgttctcgacgtcaatgttttcccgcaagccttcaatgggcggcagcagcggcgttgagccggtggcgttgacaatcagatgcggacgcagggcggaaactgaagccacgtcggcccgcttgccgatctgcagcatcaggttgtccagcgaggcgatacgatttttcataaactgcgggaaatcagcgatgcgttttttctccggcaggcgggagatttcgctggcgaggccgccgacgtggtttttcgcttccagcagccaggtatggcaaccaacttccgccgcggtgcaggcggcttccatcccggcggtgccggcgccgatgaccaccacgttagtgtcgcgattcacgcgccgcattttataggcgtcaccgtgaataatatccgggttaatcgaacagcgcagcgggcgcgagcgggcgatgcgatggtcggcgcagccgatgttgcaggagatacatttgcgcatcagacgctcttttccgccttgcactttctgcacccactccggctcggcaatcagaccgcggccaatggcgataagatcggcatcgccgctggcgaggatatcttcggctacctgtggagtgcgaatattgccggcgatgaccgtgggtttatggaatttatcgcgcaccgcgcgggagagatagcgcttccagccatcctccagcgacatctgatcgatttgcagattcaggttgtcgttctgcgccgcagagacgttgatgatatcgaccttctcctggcagagctcaagaatacgcagggaatcttcgagggtattgccgcccttgaggaagtcgtcggcgctgatgcgcagactgaccggaaaacgcggccccacgcaggcgcgaaccttatcgacaatcagactcagtatccgagtgcgattttcgacgctgccgccaaattcatcagtgcgcttattaaacagcggcgataaaaactggctaattaaataggagtgaccggcatgaatttcgacgcagtcaaaacctgcgcgccgaacgcgctccgcggcgtcaccaaatttttctaccgcatgatatatttcctcatgggtcatcggacgcggaatattaccgtgcttcttcgacggcgttgtagaagaggagagcggcgtctggccttccagtcggtaggcataagcggaagcgccggcatgatttaactgaatggatacgcaggcaccatgtttatgcagggtctcggttaatttaaacagccgtggaatatattgatcgttatcgatgcgcagttgggtggtgccgttggaggcgaaggggaaatcaatacaaatattttcgatggtgataagcccggtgccgcctttggcccgcagttcgtagtattccagctgttcctgcgacacctcgccattgagcgtggccatattggtgcccatagggggcataataatgcggttttttaacgtcataccgttgatggtcaacggactgaaaaggtgcggatagtggctcatctcttctctccacaggaggccgggaggccgatatgcggggcccaggcgtgtccttagttaatatttctctgtggcaaaagataacgaggggaaaaatcgaaaaataatgcttttttttgtgcatagccataggggttctctatgagattaacgctttcttcacattcttatatttttatattaaacactcgtgccttatttttacttgcagtgcagggaaaatacataaacagtgctggagaaggggaggaaagcggaataattcttctttaggcggtagggcagggtggcggtaaggtctgacaatcagcaaattaaaattggtttttgtgcgtgagatcgcaattttctccgcaataaaataaaaagcccgatcaaatgaccgggcccaaaggttaattcataaatgccggcagcttgcgttcatagtcggagatcgccgcttcatgctgcagcgtcaggccgatgctatccaggccgttgagcatgcagtggcggcggaaatcgtcgatcttaaagctgtaggttttatccccggctttaactacctgcgcttccagatccacttcaaacgtaatgcccgggttggcctgcaccagcttgaacagctcgtcgacctgctcgtcgctcagggtcaccggcagcagctggttattgaagctgttgccgtaaaagatatcggcaaagctcggggcgataacgaccttaaagccgtaatcggtcagcgcccacggcgcgtgctcgcgcgaggagccgcagccgaagttttcccgcgccagcagtatcgatgccccctggtactcaggaaaattcagcacgaactccgggttcggctgttgacctttatcgtcgagaaagcgccagtcgttaaacaggtgcgcgccaaagccggtgcgggtgaccttctgcaaaaattgcttagggatgatcgcgtcggtatcgacgtttgcagcatccagcggaaccaccaggccggtatgttgggtaaatttctctgccatgatggtctccttacttcagattacggatatcggcgaaatggccggtaacggctgccgccgcggccattgccgggctcaccaggtgcgtgcgtccgccgcggccctgacggccttcaaagttacggttgctggttgaggcacagcgttcgcccggattcaggcggtcattattcattgccagacacatagagcaaccaggtaagcgccactcaaagccggcttcgataaagatcttatccagaccttccgcttccgcctgcgctttcaccggaccagaacccggcaccaccagcgcctggacgcccggcgccactttacgccctttagcgatttccgccgcggcgcgtaaatcttcgatgcgcgagttggtgcaggagccgataaacactttatcgatagcgacttccgtcagcgggatcccggatttcagccccatataggccagcgctttttcggcgctggcgcgttccaccggatcgctgaacgacgctggatcggggatgttatccgtcaccgagatcacctggcccgggttggtgccccaggtcacctgcggggcaatttccgccgcctgcagcgtcaccacggtatcaaacgtcgcgccgtcgtcggttttcagggttttccagtacgctacggcatcgtcaaaatctttgcctttcggcgcatgcagacggccgcgtacgtaattgaaggtggtttcgtccggcgcgaccaggcccgctttggcgcccatctcgatcgccatgttgcacagggtcatacgcccttccatgctcagatcgcggatcgcttcgccgcagaactcaaccacatggccggtgccgccggcgctaccggttttaccaatgatggccagcacgatatctttggcggtaatgcccggcgccgctttgccctggacttcgattttcatggtcttcgcgcggccctgtttcagggtctgggtcgccagcacatgctccacttcggaggtgccgataccgaacgccagcgcaccgaacgcgccgtgggtagcggtatgggagtcaccgcacacgatcgtcatccccggcagggtaaccccttgttccgggcccatgacgtggacgatgccctgatacgggtggttcaggtcgtacagttcaacgccgaactctttacagttcttaatcagctcctgcatctgaatgcgggccatctcaccggacgcgttaatgtctttggtctgcgtcgagacgttatgatccatggtagcgaaggttttacccggctggcgcacctggcggccatgggcgcgcagaccgtcaaacgcctgcggagaggtgacttcgtgcaccagatggcggtcgatatacagcagcggggtttcgttctgcgcctcatacactacgtgcgcatcaaataatttttcgtataacgtcttcgccatgattacaccccttctgcgacatagcgggcaataatatcgcccatttcatcagtgctgaccgccgccgtgccgcgcgctaagtcgccggttcgaaccccttcttctaaggcgcggttgatcgcgttttcaatggcggtcgccgcttcgtcagcgtcgaggctgtagcgcagcagcagagccagggagaggatctgcgcgatcgggttggcgatatttttgccggcgatatccggtgcggaaccgcccgccggctcgtacaggccaaaaccttgttcattgaggctggcggacggcagcatacccatcgagccggtgatcatcgcgcactcgtcggagaggatgtcgccaaacaggttggagcacagcagcacgtcgaactgggacggatctttaatcagctgcatggtggcgttatcgatatacatatgcgccagctcaacgtccggatactccttgccgatctcgctgacgatttcgcgccacaggatggaggactgcagaacgttggccttatcgatggaagtcactttgtgacgacgcttgcgggcggattcaaaagcgatgcgcgcgatacgctcgatctcaaagcggtgatacacctcggtatcaaaggctttctcatgctgaccgctgccttcgcggcctttcggctggccgaagtagatgccgccggtcagttcgcgtacgcagagaatgtcgaagccgttagcagcgatgtcggcgcgcagcgggcagaactcttccagcccctgatacagtttggccgggcgcaggttgctgaacagtttaaagtgtttacgcagcggcagcagcgcgccacgctctggttgttccgccggcggcaggtgctcccatttcggaccgccgacggagccgaacaggatcgcatccgcctgctcgcatccggcgacggtcgcctgcggcaggggagttccctgacggtcgatggccgccccgccaacgtcatactggctggtggtaatgtgcatggcaaaacgttggcgcacggcttccagtactttcatcgcctggttcatcacttccgggccaatgccatcacccggcaaaacggcaatatggtaattcttcgacattacacggtttccttattgttctctttattctgagctttgcgttgcaattctttttcgacttcggcggcgcgccagatgttgttcagcacgtgaaccatcgctttggctgacgactctacgatatccgttgccagaccaacgccatggaagcggcggccattgtagtcaacgacgatatccacctggcccagggcgtctttgccgtggcctttcgcgcttaagccatacttcactaattcaatgttgtagtcggtgacgcggttaatcgcctggtagatagcatcgaccggaccgttgccgttggcggcttcggttttgatctcatccccgcagaccagtttgatcgaggcggtggcgatatcgctggatccggattggacgttgaagtaatccaggcggaaatgctctggctcttcctgctgcttgttgataaaggccagcgcttccagatcgtaatcgaaaacctggccttttttgtccgccagcttcaggaatgcgtcgtacagatgatccaggttgtaatcgctctcctggtagcccatctcttccatccggtgtttcaccgccgcgcggccggagcgggaagtcaggttcagttgcacctggttcaggccgatagattccggggtcatgatctcgtagttttcgcggttcttcagcacgccgtcctggtgaatgccggaggagtgggcgaaggcgccggtgccgacgatggccttattcgccgggatcggcatattgcagatctggctaacggtctggctggtgcgccagatttcatgatgattaatgttggtgtgcacgttcatgatgtctttgcgcactttgatcgccatgatcacttcttccagcgcgcagttgccggcgcgttcgccgataccgttcatcgcaccttctacctggcgcgcaccggcgtggaccgcggcgagggcgttaccgacagcgatgcccagatcatcatgggtgtggacggaaataattgctttgtcgatattcggcacgcgatcatacaggccgctgatgatgttggcatattcgaacggcatggtatagccgacggtatccgggatattaatggtggtggcgccggcgttgatcgccgcttccacgacgcgagccagatcggcaatcggcgtacggccggcgtcttcacaggagaactcaacgtcgtcagtgtagttgcgtgcccgcttcaccatatagatcgcgcgctcaataacctcatccagcgtactgcgcagtttggtggcgatatgcatcggcgaggtggcaataaaggtatgaatacggaaagcctcggccacttttaacgattccgccgccacgtcgatatctttctcaacgcagcgcgccagggcgcacacgcggctgtttttaatggtgcgtgcgatggtttgcaccgattcaaaatcgcccggcgaggataccgggaaaccgacttccattacgtcgacccccattcgctcaagggccagtgcgatctgcagcttctctttgacactcaggcttgcctgtaacgcttgttcgccatcacgtaaggtcgtatcgaaaataatgacttgctggctcatggtttggatccttagtctgtgtcctggcgccttgttgacgagcataaaaaaacccgcgccaaggcgcgggttttatagtcttgctggaagatgacttaacgctgaacgtcgcccaacagcctaccgcgcaaatggcatgcgtttagtagtagtaggctggtgatacgagcggtgcgaatcattgcgtcaaactccagatgaaatcgttatgcttttagagttactggatagccgttttaaagtcaacccctggcatggaaaaagcgttttgggctgactaaatgaattagcaaaatgtgctgatgtaagccccattttgccgaagatcctattttggaccgaaggcggtttatccccaattgtttcatttgaaaaagtgctttgcattcaaggcatcgtcgaacaggtgtcgccaatgaagggacaaaaaacggtatctggatgaaaatattaaatttattttccatgtgaatgtattcgaacgctagcggattatttttcaatgataaaggtttgttaattttatggagggaaaaataaaatactttattattgcttaagttacagttaactcgtggtgctgtttttatttttatggattatggttacacttatcatcattaagtaatcagtatggtttgagcggctcaattttttgatcaagaccgtttcttcactgccactcatagccttgatatattcctaaaaatttcttttgctattttgtaaatgtcatttgcatggtaaatgatattttcggcgctaattatagcggtttagtgaagggaattcatcgtgacggcggaattagatatgttaattgaaactccagaatataaatcagcccccggacaggaagtcgttaaacctcaactacggatggttgatctcaatctgcttaccgtttttgatgcggttatgcaagagcagaatattactcgtgccgcccatacgctcggcatgtcacaacccgcggtgagcaatgcggtttcacgactgaaagtgatgtttaatgacgagctttttgtgcgctatggccgcggtattcagccgacggcgcgcgcctatcagctgtttggctcggtacgccaggcgctgcagctggtccaaaacgaattgccaggctccggttttgaaccgctgagcagtgagcgcgtgttccatctgtgcgtctgcagcccgctggataacatcctgacgtcggttatttttaataaagttgcagagatagcacccaatattcatttagtctttaagtctgcgctgaatcaaaatacggaacatcagctacgttatcaggaaacagaattcgtaatcggttatgaagagttccgtcgccctgagtttgcctgcgttccgttatttaaagacgaaatggtcctggtcgccagtcgcaaccatccgcgtatttccgggccgatgatggaggcggatatttatcgcgaggagcatgccgccgttgctctcgaccggtatgcctcatttagtttgccgtggtatgacacggccgataaacaagcgcgtatcgcctatcagggtaatgcgatggtcagcgtattaaacgtagtatcgcaaacccagatggtggccattgccccgcgctggctggcagatgaatttgctgacaagcttgccctgcaaatattacctttgccgttgaaggtcaacagtcggacctgctatctctcctggcacgaagccgctggtcgtgataaaggccaccagtggatggaagagctgctggtggacatttgcaagcgctgacccgacgacgatagatagcaaaggagcttcggctcctttttttatatgacataaatcaaataaagcagaattttattctgtttaccttgcgcgaggggttcgttgtgttcgtgaaaaatggatctattcctgttatcaccctttttcgccgagtatttaccattctcttttcttatctctgaagcaattcaccatattttcccctcaccgctttcttttcttcttattcaagaaataaggcctcagctgcggcgaattgcctgcctgctggcgagcagttatggtagtggcatgcagtacattcacctcaatgcggaggaccactccttcgcatcgtgcgagcgcgcggaaattgagttccgctgtcgtaaaacaataagcctggaggcaaaccatggagatgttgtcaggagccgagatggtcgtccaatcgcttgtcgatcagggcgtcaagcaagtattcggctatcccggaggcgcagtcctcgatatctatgatgcgttacatacccttggcggtatcgatcatgtgctggttcgtcacgagcaggcggcggtgcatatggcggatggcctggcgcgggcgaccggggaggtcggcgtggtgctggtgacctctgggcctggggcgacgaacgccatcactggcattgcgacagcctatatggactctattccgttggtgatcctctcggggcaggtagccacctcgcttatcggctacgatgccttccaggagtgcgacatggtggggatttcccgtccggtggtgaagcacagtttcctggtgaagcagaccgaagatattcccggcgtgctgaagaaagccttctggctggcggccagcggtcgccccggtccggtagtggtcgatctgccgaaggatattctcaatccggcgaagaagctgccttacgtctggccggacgcggtgagcatgcgctcgtataacccaaccaccagtggccataaagggcagattaaacgcgcgctacagactctggtggccgcaagtaagccggtcgtctacgtcggcggcggggcgatcaatgcgcattgcgaacctcagctgcgcgagctggtggaaaaactgaagctgccggtggcctcatccttgatgggacttggcgctttcccggcgacacactcgcaggcgctggggatgctggggatgcacggcacctatgaagccaacatgaccatgcaccactcggacgtgatttttgccgtcggcgttcgctttgacgaccggaccaccaataacctggccaagtattgtcctaacgcgacggtactgcatattgatatcgatccgacttcaatctcgaaaaccgtgccggcagatgtgccgatcgtcggcgatgcccggctggtgctggagcagatgctggagctgctggagcaggaggaagcgcagcagccgctggacgacattcgcgactggtggcaacagatcgagcagtggcgtgcccgtcattgtctgcgctacgacgaccagagcgataaaatcaaaccgcaggcggtaattgaaactatctggcggctgacccaaggcgatgcctacgtcacttccgatgtgggtcagcatcagatgttcgccgccctgtattaccccttcgataaaccgcggcgctggattaactccggtggtctcggcaccatgggctttggcctaccggctgcgctgggggtcaaaatggctctgccggacgaaatggttgtctgcgtgaccggtgacggcagtatccagatgaacattcaggaactctccactgcgctgcagtatgagctgccggtcctggtgcttaacctcaacaaccgctatctcgggatggtgaagcagtggcaggatatgctctattccgggcgtcactcgcagtcctatatggaatcgctaccggactttgtccgtctggcggaagcctatggccacgtcgggatccgcatcagcgagccgcaggagctggagacgaagcttgctgaagctctggagcaggtgcgccagcgtcggctggtgtttgtcgatgtgaccgtcgacggcagtgagcatgtgtaccccatgcagatccgcggcggcggcatggatgaaatgtggttgagcaaaacggagaggacctgattatgcgccggatattatcggtattactggaaaacgaatcgggtgcattgtcccgcgttatcggcctcttctcccagcgtggctataatatagaaagcctgactgtcgcgccgacggacgatcccactctctccagaatgaccattcagaccgtgggcgatgaaaaagcgattgagcagattgaaaagcaactgcacaagctggtggatgtcctgcgggtcagcgagctggggcagggggctcatgttgaacgcgaaattatgctggtgaaggttcaggccagcggctatggccgtgaagaagtgaagcgcaacaccgaaatcttccgcggacagattatcgacgtgacgccttctatctataccgtccagctcgccggcaccagcgataagctggatgcatttctggcctcgctgcgcgatgtcgctcggattgtggaagtggctcgctccggcgtggtcggcctgtctcgcggtgataaaatcatgcgctaaggatcgggaactgctgtaaaaatagcccggcagagactgtcgggctttttttttgcgaaatcagtaggaactgtaagcgaaagcggttgctgcgctaactattctgcgcttagatgttataaaaaggattccatacctgaataatggttatgtttggcacttcttacccaaggggcaattgtgaaactggatgaaatcgcccggctggccggtgtttcaagaaccaccgcgagctatgtgattaatggcaaagcgaagcagtaccgcgtaagcgataaaacggtcgaaaaagtgatggctgtggtgcgagagcacaactatcacccaaatgcggtcgctgctggcctgcgtgcaggacgcacacgctctatcggtctggtgatcccggatctggaaaacaccagctatacccggattgcaaattatctcgaacgtcaggcgcgtcagcgcggctatcagctgctgattgcctgctcggaggatcagcccgataacgagatgcgctgcattgagcatctgctgcagcgccaggtggacgctatcattgtctctacttcgctgccgccggagcatccattttatcagcgctgggctaacgacccgtttccgattgtcgccctcgaccgcgccctcgatcgcgagcacttcaccagcgtggttggcgctgaccaggatgacgccgagatgctcgcagctgagctgcggacgtttcctggcgaaacggtgctctatctcggcgcgctgccggagctgtcggtgagcttcctgcgtgaacagggcttccgtaaagcctggcaggacgatccgcgtgaggtgcattatctctatgccaacagctatgagcgcgaagcggcggcccagctgtttgagaaatggcttgaaacccatccgatgccacaggcgctgtttaccacctctttcccgctgctgcagggcgtaatggatgtgaccttgcgtcgcgagggtaaactgccctccgagctggcgatcgccaccttcggtgataatgagctgctcgattttctgcagtgtccggtactggccgtggcccagcgtcatcgcgatgtcgctgaacgggtgctggagatcgtcctcgccagcctcgacgaacctcgcaagccgaagccgggtcttagccgcattcgccgtaatctctatcgtcgcggtagcctgaatcgccgctaagggcgctatatcgccagcgcccaggtataaacctggcaggcctgaccgtaagcaggccgctggcgataaatcaggcaattgacgtgcaaaatgcaaaactgaatatatttcagacaaatccctaaacttctttacgcgttattttattttattcactgaccatcgttttgtgactccaaatggggtacaaaaaatgactgcgcggactttaattgtattattttgttacattcatcaggttaattgctgaattaacactcattttgtacgcgccacgctttcttccccgtcatatcccgcgcctggccagtccctctgccagcaacaggtactgttaacggccggcataatggcctaaaatgccgctcgcgtcgcaaactgacactttatattttcccgccgaagatattctgttgtttataactgttacgagtttgttggttattttcttacacgtattcataacgttaatttgcctcgcctgttgatgattttttcatcagggctaatgtcggctgtaaataatgggtttttgagctccgttggcatccgtgctggcttgacaagcttttcctccgctccgtaaactccttctggtgggaatttgtggggtaaagtggcgaaaaggggtgaggctggcatgttccgtggagcaacgttagtcaatctcgacagcaaaggccgcctggccgtgccaacgcgctatcgcgaagggctgatcgaggacgctgccggtcaattggtatgcaccattgacattcatcacccgtgcctgctgctttatccattgcctgaatgggaagtcatcgagcagaaattgtcgcgtttatcgagcatgaatcccgttgagcggcgcgtacagcgtttgcttttgggtcatgccagcgaatgtcagatggataatgccggccgcttgctgattgcgccggtgttacggcagcatgccgggctgacaaaagaagtgatgctggtcgggcagtttaataaatttgaactgtgggatgaaacgacctggtatcaacgggtcaaggaagatatcgacgctgagcagtccgcgaccggtgaactgtcggagcgcctgcaggatttgtccttataaaaatgatggaaaattataaacatactacggtacttctggatgaagccgtcaacggcctcaatattcgtccagacggtatctatattgatggtacttttggccgcggcggtcactcgcgcctgatcctctcccggctgggtgcggaaggacgcttgctggccatcgatcgcgacccgcaggcgattgccgtcgcgcgaaccatcgatgacccccgcttttccatcgtacatggtcccttttcaaaactcgctgagtacgtcggcgagcgcaatcttaccggtaagatcgacggcattctgctcgatctcggcgtctcttccccgcagcttgacgatgcggaacgcggcttttcctttatgcgtgacgggccgctggatatgcgcatggatccgacgcgcggtcagtccgcggccgaatggctgcagacggctgaagaagacgatatcgcctgggtgattaaaacctttggcgaagagcgtttcggcaaacgtatcgcccgcgcgatcgtcgaacgtaatcgcattcagccgatgacccgcaccaaagagctggcggaagtcatcgccgcggcgatgccggtaaaagataagcacaaacatcccgcgacccgtaccttccaggcggtgcgcatatgggtaaacagtgaactggaggagatagagcaggcgctaaaaagctcgctcagcgtgctggccccgggtgggcggctgtcgatcattagttttcattcgctggaagatcgcattgtgaagcgctttatgcgtgagcaaagccgcggtccgcaggttccggcgggaataccgatgaccgaagcgcagctcaaaaaactgggcggccgtgagttgcgagcactaggcaagttgatgccgggcgaagaagaggtggcagagaatccacgcgcccgtagttcagtgctgcgtatcgcagagaggacgaacgcatgatcggcagagtgacagaggccttaagcaaggttaaagggtcgattggaagcaacgagcgccatgctttgcctggcgtgatcggggacgaccttctgcggtttgggaaactgccactctgcctgttcatttgcatcattattacggcgattaccgtggtcaccactgcgcatcacacgcgcctgttgaccgcgcagcgtgaacagctggttctggagcgcgacgccctggatattgagtggcgcaacctgatcctcgaagagaacgcgctcggcgatcacagtcgggttgagcggatcgcgaccgagaagttacagatgcaacacgtcgatccatcacaagaaaatatcgttgtacagaaataaggattattgcgacggatgaaagcagcgccaaaaacgcctaaagcaaaacgtcaggaagaacaggccaactttatcagttggcgttttgcgttgctgtgcggctgtattctgctggcgctggcttttctgctgggtcgcgtcgcctggctacaggtgatcagccccgatatgctggtgcgccagggcgatatgcgttctctgcgcgtacaggaagtgtccaccgcgcgcgggatgattaccgatcgctccggacgtccgctggcggtcagcgtgccggtgaaggctatctgggccgacccgaaagagctccatgacgccggcggggttaccctggatacacgctggaaggcgctggcggatgccctcaatatgccgctggatcagctggcgacgcgcatcaataccaatccgcggatgcggtttatctatctggcgcgtcaggttaaccctgacatggccgattacatcaagaagctgaagctgccgggcattcatctgcgcgaagaatcccgtcggtactacccttccggggaagtaaccgctcacctcatcggctttaccaacgtcgatagccaggggattgaaggggttgagaaaagctttgataaatggcttaccggccagccgggcgagcgtatcgtacgtaaagaccgctatggccgggtaattgaagacatctcttctaccgatagccaggcagcgcacaacctggcgctgagtatcgacgaacgcctgcaggcgctggtctatcgcgagctaaacaacgccgtggcctttaacaaagccgagtcgggcagcgccgtgttagtggatgttaacaccggtgaagtgctggcgatggccaacagcccatcctataacccgaacaacttcgccggtacggcaaaagacaccatgcgtaaccgtgcgattaccgacgtgtttgagccgggttcgacggtgaaaccgatggtggtcatgacggcgctgcagcgcggtatcgtcaacgaaaataccgtgctcaataccgtgccttatcgaattaacggccacgaaatcaaagacgtggcgcgctacagcgaattgaccctgaccggggtgctacagaagtcgagtaacgtcggtgtttctaagctggcgttagcgatgccgtcctcagcgttagtagatacttactcacgttttgggcttggaaaggcgaccaatttggggttggtcggagaacgcagtggcttatatcctcaaaaacaacggtggtctgacatagagagggccaccttttctttcggctatgggctaatggtaaccccgttacagttagcgcgagtctacgcaacgattggcagctatggcatctatcgcccgttgtcgattaccaaggttgatcctccggttccgggcgagcgcgtcttcccggaatcactcgttcgtaccgtcgttcatatgatggaaagcgtggcgctgcccggcggcggcggtgtgaaagcggcgatcaaaggctatcgcatcgcgattaaaaccggtacggcgaaaaaagtggggccggatggccgctatatcaacaaatatattgcttacaccgcaggcgttgcgcccgccagccatccgcgcttcgcgctggtggtggtgatcaacgacccgcaggcaggtaaatactacggtggcgccgtttccgcgccggtcttcggtgccatcatgggcggcgtattgcgcaccatgaacatcgagccggatgcgctggcaacgggcgaaaaaagtgaatttgtaattaatcaaggcgagggaacaggtggcagatcgtaatttgcgcgacctactcgctccatgggtgccaaacgcaccggagcgcattctgcgagagatgacgctggacagccgggtggctgcttccggcgatctctttatcgcggtacagggtcatcaggcggacgggcgtcgttatatcccgcaggcgatagcgcaaggtgtggctgccattattgctgaagcgcagggcgaagctaaagacggtgagatccgtgaaatgcacggcgtgccggttatctacctgagccagcttaacgaacgcttatcggcgctggccgggcgtttttatcatcagccgtcgcagcagctgcgtctggtgggcgtcaccggcaccaacgggaaaaccaccaccactcagctgctggcgcagtgggcaaagctgctcggcgaaaccagcgcggtgatggggaccgtcggtaacggcctgctggataaagtcgttccaactgaaaacaccaccggttccgcggtggacgttcaacatgtgctctccagtctggtcgggcagggggctaccttcggcgcgatggaagtctcctcccacggtctggtacagcaccgcgtagcggccctgcagtttgccgcctcggtgtttaccaatctcagccgcgatcatctcgactaccatggcgacatggagcactacgaagcggcgaaatggctgctgtactccacccatcattgcggtcaggccatcgtcaatgctgacgatgaagtcggtcgtcgctggctggcaaaactgccggacgcggtggcggtatcgatggaagatcatatcaacccgaattgccacggccgctggctaaaggccaccgcggtgaactatcacgacagcggggcgaccatccagtttgactccagctggggcaagggcgaaatcgaaagccgcctgatgggcgcatttaacgtcagcaacctgctgctggcgctggccacgctgctggcgctgggctatccgctggccgatctgctgaagaccgcagcgcgtttacagccggtgtgcggccgtatggaagtgttcagcgcgccgggtaaacctgccgtggtggtagattatgcccatacgcctgacgcgctggaaaaagcgctgcaggcggcacgcctgcactgcagcggcaagctgtggtgcgtcttcggctgcggcggcgaccgcgacaaaggtaaacgtccgttgatgggcgctatcgcggaagagtttgccgacatcgtggtcgttactgacgataacccgcgcaccgaagagccgcgggcgattatcaacgatattctggccggcatgctcgatgcaggtcaggcgaaggtgatggaaggccgcgcggaagcggtgaccaacgccgtgatgcaggcgaaagagaacgacgtggtgctggtggcgggtaaaggccatgaagattaccagatcgtcggcaaccgccgtctggattattccgaccgcgtgaccgtcgcgcgtctgctgggagcggtagcatgattcgctttacgttaagtcaacttgccgcgatcgcccatggcgaacggcagggtagcgatgtcgctatcgacgaggtgaccaccgatacccgtaaagtgacggcgggctgcctgtttgtggcgctgaaaggggagcgtttcgacgcccatgattttgccgaacaggcgaaagcggcgggcgccggcgcgctgctggtgagtcgtccgctggcctgcgatctcccgcaggtgattgtgaacgatacccggcaggctttcggtgagttagccgcctgggtgcgtcagcaggtgccgactcgcgtcgtcgccctgaccggctcgtccggtaaaacctcggttaaagagatgaccgcggcgatcctcagccagtgcggcaacacgctgtataccgccggcaacctgaacaacgatatcggcgtcccgatgacgctgctgcggctgaccaaagagcatcagtacgcggtgatcgaactcggcgccaaccaccagggcgaaatcgcctggaccgtcagcctgacgcgtccggaagcggcgctggtcaacaaccttgctgcggcgcacctggaaggtttcggttcgctggcgggcgtggcgaaggcgaagggcgaaatctataccggtctgccggaaaatggcatcgccatcctcaatgccgacaataacgactggctgaactggcaggcggtgattggcgatcgcaaagtgtggcgcttctcgccgaacgcggcgaacagcgatttcacggcgaccaatgtgcagatcaccagccacggcaccgaatttacgctgcagaccccaaccggcaacgttgacgtactgctgccgctgccgggacgccacaacatcgctaatgcgctggccgccacttcgctggcaatggcggtaggcgccgatttggcggcggtgaaagcagggctggcgcagctgcaggccgttccgggacgtctgttcccgatccggctgaccgagagccagctgctgctggatgattcctataacgctaacgttggttcgatgaccgcggcggtgcaggtgctgtcagagatgcccggctttcgcacgatggtggtcggcgatatggcagagcttggcgcggagagcgcggcctgccatcgcgaagtcggcgaagcggcgaaagcggcgggtctggattgcgtcctcagcgtcggcgccttgagcgcggatatcagctgcgccagcggcgtgggcgaacattttaacgataaagccgccgtggtggctcgcctgcgcgagctgctggcggagcacaaaataatgaccattttagtgaagggttcacgtagtgccgccatggaagaggtagtacgcgcattacaggagactgggacatgttagtatggctggccgaacacttggtcaaatattattccggctttaacgtcttttcatatctgacgtttcgcgccatcgtcagcctgctgaccgcgctgttcatctcgttgtggatgggcccgcgcatgatcgcccgtctgcaaaaactcgcctttggccaggtcgtacgtaacgacggcccggagtctcatttcagtaaacgcggtactccgaccatgggcgggatcatgatcctcaccgcgatcaccgtttccgttctgctgtgggcctatccatctaacccgtacgtctggtgcgtactgacggtattaatcggctacggcatcatcggtttcgttgatgattaccgtaaagtcgtgcgcaaagataccaaaggcctgatcgcccgctggaagtatttctggatgtcggtgatcgccctgggcgtggccttcgcgctgtatctggcggggaaagataccccggcaaccgagctggtggtgccgttctttaaagacgtaatgccgcagctggggctgttctatatcttgctggcctacttcgttatcgtcggtaccggcaacgccgtcaacctgaccgacggcctcgacggcctggcgattatgccgaccgttttcgtcgcggcaggctttgcgctggtggcatgggccaccggcaacatgaattttgccaactacctgcatatcccgtatctgcgccacgctggcgagctggtgatcgtctgtacggcgattgtcggggcggggctgggcttcctgtggttcaacacctacccggcgcaagtctttatgggcgacgtcggttcactggcgctcggcggcgcgttgggcattatcgccgtgctgctgcgtcaggagttcctgctggtgatcatgggcggggttttcgtggtggaaacgctgtcggttattctgcaggtcggctcctttaagctgcgcggtcagcgcatcttccgcatggcgccgatccaccaccactatgaactgaaaggctggccggagccgcgcgttatcgtgcgcttctggattatttcgctgatgctggtgctgattggcctggcgacgctgaaggtacgttaatcatggcagattatcagggtaaaaaagtcgtcataattgggctgggcatgaccggcctgtcatgcgtggactttttcatggcgcgcggcgtaaccccgcgcgtgatggacacccgcgtcgcgcctccggggctggataaattacccgaatcggtcgaatgccatgtcggcggactcaatgatacctggctgctggcggcggacttggttgtcgccagtccggggattgcgctggcccatccttcgctcagcgcagcggccgacgctggcgtagagatcgttggcgatatcgaactgttctgccgcgaagcgcaggcgccgattatcgccattaccggttctaacggcaaaagcactgttactaccctggtgggcgagatggcgaaagccgctggagttaacgtcggcgtgggcggcaatatcggcctgccggcgctgatgctgctggacaccgatcgagagctgtatgtgctggagctctccagcttccagttggaaaccacctccagcctgcaggcggtggcggcaaccatcctcaacgtgactgaggaccatatggaccgctacccgctgggactgcagcagtatcgtgcggcgaagctgcggatttacgagaatgcgaagacctgcgtggtgaacgcggacgatgcgctcaccatgccggtacgcggggcggacgaacgctgcattagctttggcgtcgatgtcggtgactaccaccttaaccgccagcagggcgaaacctggctgcgcgttaaaggtgagaaagtcctcaatgtgaaagagatgcctctcaccggtcagcataactacagcaacgccctggcggcgctggcgctggccgatgccgcgggtctgccgcgggccagcagcctgaaggcgctgaccacctttaccggtctggcgcaccgtttccagctggtgctggatcacaacggcgtacgctggattaacgactcgaaggcgaccaacgtcggcagcaccgaggcggcgctgaacggcctgcagctggacggcacgctctatctgctgctgggcggcgacggcaagtccgctgatttcaccccgctgaagcgctacctcggcggcgatcgtattcgcctgtactgctttggtcgcgatggcgccgagctcgctgagctgcgtcctgaggtggcggtacaaactgagactatggaacaggcgatgcgtcagattgctcccctggtgaaagcgggggacatggtgctcctgtcgccggcctgcgccagcctggatcagtttaagaactttgaacaacggggcgagatgtttgcccgtctggcgaaggagttaggttgatgcgtttctctctcccacgcctgagaatgccgcagctgagcctgcctcggctgagactgccgcgactgccggggatgtttattttcgcctggctattcgctgcgctgaaaggctgggtgatgggctcgcgcccgaaagataacgacagtctggtgatgtatgaccggatgctgctatggctgaccttcggcctggcggcgatcggctttattatggtgacctcggcgtcgatgccggtcggacagcgcctggcgaacgatcctttcctcttcgccaagcgtgacggcctgtacattgtactggccttcgcgctggcgatgattacgctacgtctgccgatggatttctggcagcgccacagtaccgcgatgctaatcgcctcgatcgtcatgctgctgatcgtactggtagtaggcagctcggtaaacggcgcatcgcgctggatagcccttggtccgctgcgtattcagccggcggagttcaccaagctgtcgctgttctgctacatcgccaactatctggtgcgtaaagccgacgaagtgcgtaacaacctgcgcggcttcttaaaaccgatgggcgtgattttcgtactggccatcctgctgctggcgcagcctgacctcggtaccgtggtggtcctgttcgtcaccacgctggcgatgctgtttctcgccggcgcgaagctgtggcagttcatcgccattatcggcatgggtatttcggcggtggtcctgctgatcctcgccgaaccataccgtattcgccgcgtgacctccttctggaacccgtgggaagacccgttcggcagcggctaccagctgacccagtcgctgatggctttcggccgcggcgagatgtgggggcagggcctcggcaactcggtgcaaaaactggagtatttaccggaagcgcacactgactttatcttcgccattatcggcgaagaactcggttatatcggtgtggtactggcgcttttaatggtattcttcgtcgctttccgcgccatgtcgattggccgtaaagcgctggagatcgatcatcgcttttccggcttcctcgcctgtgcgattggtatctggtttagcttccaggcgttagttaacgtcggcgcggcggcggggatgctgccgacgaaaggtctgacgctgccgctgatcagttatggtggttccagtctgttgattatgtcgacggccattatgttgttgttgcgaattgattatgaaacgcgtctggaaaaagcccaggcgtttacacggggtgtgcgatgagcggtcaggaaaagcggttgatggtgatggcgggcggtaccggcgggcatgtgttcccgggactggcggtcgcgcaccatttaatggaccagggctggcaggttcgctggctgggtaccgccgatcgtatggaagcggatttagtgccgaaaaacggcatcgaaattgattttatccgcatctccggcctgcgtggcaaaggtatcaaagcgcagctactggcgccggtgcgtatctttaacgcctggcgtcaggcgcgggcgatcatgaagcgtttccagccggacgtggtgctgggcatgggcggctatgtttccgggcctggcggtctggcggcgtggtcgctggggatcccggtggttctccacgagcaaaacggcattgccggcctgactaacaagtggctggcgaagattgcgaagaaagtgatgcaggcgtttcccggcgcgttcccgcatgcggacgtcgttgggaacccggtgcgcaccgatgtactggcgctgccgctgccaggtcagcgtctggttggccgtcagggaccgattcgcgtgctggtggtcggtggctctcagggtgcgcgcgtcctgaaccagacgatgccgcaggtggcggcgaagctcggcgctacggtgaccatctggcatcaaagcggcaaaggcggccagcaaaccgtgcagcaggcctatgccgccgccggacagccgcagcataaagtgacggaatttattgatgacatggccgcggcgtatgcctgggcagatgttgtggtttgccgttccggcgcgctgacggttagcgaaatcgcggccgcaggtttaccagcgctgtttgtcccgttccagcacaaagatcgtcagcagtactggaatgcgctgccgcttgagaaagccggcgcggcgaaaattcttgaacagcctgagttcacggtagaagcggttgcctctaccctggcgagctgggatcgggaaaccttgctggatatggcggaacgagcgcgtggcgcttcgattccggacgctaccgagcgggtagcagaagaggtcagcgccgtagctttggcgcgctaattgcggtgattttcaccgctcgaatacagaagttgatggcgtaaagaatgaatacacaagatttggcaaaactgcgttccatagtgcccgagatgcgtcgcgttcggcacattcactttgtcggcatcggcggtgccggtatgggcggtattgccgaagtgttggctaacgaaggttaccagatcagcggctccgacctggcgccgaatccggtgacccagcagctgtcgcagcttggcgccaccatttatttcaaccatcgcccggaaaacgtgcgtgatgccagcgtggttgtcgtttccagcgcgatttcggcagataacccggaaatcgttgccgcgcatgaggcgcgtatcccggtgatccgtcgtgccgaaatgctggcggaacttatgcgctttcgccacgggatcgccattgccgggacccacggcaaaaccaccaccaccgcgatggtatccagcatttacgccgaggccgggctggacccgacctttgtcaacggcgggctggtaaaagcggcgggcgtacatgcccgccttggccatagccgttacctgatcgcggaagcggatgagagcgacgcgtcgtttctgcatctgcagccgatggtggccattgtcactaacatcgaagccgatcacatggatacctaccatggcgacttcgagaatctgaagcagacctttatcaacttcctgcacaacctgccgttctacggacgcgcggtgatgtgcgtggacgatccggtgatccgggaactgttgccgcgcgttggccggcagatcaccacctacggttttagcgacgacgccgacgtacgcgtcgaggactatcgtcaggttggggcgcaggggcatttccgcctggtgcgccaggataaagcgatcctgcaggtgacgctcaatgccccgggacgccataacgcgctgaacgcggcggcggccgtcgccgtggcgacggaagaggggattgacgatcgggctattctgcgcgcactggagagcttccagggaactggacgccgctttgattttcttggcgagtttccgctggccgaagtcaacggcaaaccgggcagcgcgatgctgatcgatgattacggtcaccacccgacggaagtggacgccaccattaaagcagcgcgcgccggctggccggataaaaacctggtgatggtattccagccgcaccgttatacccgtacccgcgatctgtatgatgattttgccaacgtgctgacccaggtggatgccctgctgatgctggacgtctatccggcgggcgaagcgccgatcccgggcgccgacagccgctcgctgtgccgcaccattcgcggtcgcgggaaagtggatccgatcctggtgcccgattcgacccaggccgcggagatgctggcgtcagtcctgaccggtaacgatttagtactggtgcagggcgccggtaacatcggtaaaatcgcccgccacctggctgaaatcaaactgatcccgcaaaaaacggaggaggagcgccatggctgataaaatcgcggtgcttttcggtggaacctccgctgaacgtgaagtgtcgctgaattcaggcgcggcggtgctggccgggctgcgtgaaggcggggtggacgcccatccggtcgacccgcgcgatgttgatattacccagctaaaaaagcagggctttaagaaagcgtttattgccctccacggccgcggcggggaagatggcactctgcaggggctgctggagttaatccagctgccttataccggcagcggcgtgatggcttcggcgatttcaatggataaactgcgcagcaagtggctgtggcagggcgccggattaccggtcgcgccgtgggtggcgctgacccgcgcccagtttaccgccgggctgtctactgacgtcgaacagcaaattgcggcgctgggtctgccggtcatcatcaagccgagccgtgaaggctccagcgtcgggatgtcgaaagtcagcgaaagttgtgatttagcgagtgcattggcgttggcttttcagcatgatgatgaagttttggtcgaaaaatggctcagtggaccggaatttaccgtcgccatagtcggtgaagaaattttaccgtcaatacgtatccaggccgcgggaaccttctatgattatgaggcgaagtatctctctgatgagacgcaatatttctgcccaggatttgaagatcccgcgcgtgagtcagctattcagaacctggtgcttaaagcctggaatgttctgggttgcaaaggctggggccgtattgacgtgatgctggacagcgatggccagttttatctgctggaagcgaatacttccccgggcatgaccagccatagccttgtgccaatggcggcgcgtcaggcaggaatgagcttctcccagcttgttgtacgaattctggacctggcggggtgatatgtcgcaggctgcgctgaatacgcggaaccatgaagaagaggcttcttcttcgcgtcggagtaatggaacgcggctggcagggatcgttttcctgctggcggtgctgtttaccgtgctggtcagcgggtggatggttcttggctggatggaagatgcgcagcgcttaccgctgtcgaagatggtggtgaccggcgagcgtcactatacgcgcaatgatgacatccgtcaggcgatcctggcgctgggttcgccgggtacctttatgactcaggatgtgaacatcatccagagccagatcgaacgtctgccgtggattaagcaggcgagcgtccgaaagcagtggcccgatgaattgaagattcatctggttgaatatgtgccgattgcgcgctggaatgatcaacatatggtggatgcagaaggaaatgccttcagcgtgccggcggatcgcaccagcaaacagaatttaccgatgttatacggtcccgaaggcagcgagaacgaagtgctgcaggggtatcgtgacatggggcaggtgctggcaaaggataaattcacgttgaaagtggcggcgatgaccgcccgtcgctcctggcagttgacgcttaataatgacatcaagctcaaccttggccgtggcgataccatgaaacggcttcagcgctttatggaactctacccggttcttcagcagcaggcgcagaccgacggcaaacggattagctacgttgatttgcgttatgactcgggtgcggcagtgggctgggtacctgctcccgcagaggaaactaatcaacaacagaatcaggcacaggcagaacaacaatgatcaaggcgacggacagaaaactggtagttggactggagattggcaccgccaaggtggccgctttagtaggggaagttctgcccgacggcatgatcaatatcatcggcgtgggcagttgcccatcgcgtggtatggataaaggcggtgtgaacgacctcgagtcggtggtgaaatgcgtacagcgcgccatcgaccaggccgaactgatggcggattgccagatttcatcagtttatttggcactttcgggtaaacatataagctgtcagaatgaaatcgggatggtaccgatttcggaagaagaagtgacgcaggacgacgtcgagaacgtggtccacaccgcgaagtcggttcgcgttcgcgatgaacatcgtgtcctgcacgtgattccgcaggaatatgctatcgactaccaggaagggattaaaaacccggtagggctgtccggcgtgcgtatgcaggcgaaggtgcatctgatcacctgccataacgatatggcaaaaaacattgttaaagcagtggaacgttgtggtctgaaagttgaccaacttattttcgccgggttagcggccagttattcggtattaacagaagacgaacgtgagctgggcgtctgcgttgtggatatcggcggtggtacaatggatatcgccgtctacaccggcggcgcattgcgtcacaccaaagtgatcccgtatgccggtaacgtggtgaccagcgatatcgcctatgccttcggtacgccgccgagcgatgccgaagccatcaaggttcgtcacggatgcgcattgggttccatcgtcggtaaagacgaaaacgtcgaagtaccgagcgttggtggacgtcctccgcgtagcctgcagcgtcagacgttggcagaggtgattgaaccgcgctataccgagctgcttaacctggtcaatgaagagatcctgcagctgcaggaacagctccgccagcagggtgttaaacatcatctggcggcggggattgtgttaaccggcggcgcggcgcaaattgaaggtctggcggcctgtgcgcagcgcgtgttccatactcaggtgcgcattggcgcgccgctgaacatcaccggtttaaccgactatgcccaggagccgtattattcaacggcggtggggctgctgcactacggaaaagagtcacatctcagtggtgaagcggaagtagaaaaacgcgtgacggcctcagtgggctcgtggattaagcgactcaacagctggctgcgaaaagagttttaattttttaagagaacgcagacaattagcgttctcaggcgacaggcacaagacggagagaaactatgtttgaacctatggaactgaccaacgacgcggtgattaaagtcatcggcgtcggtggcggcggcggtaacgccgttgaacacatggtgcgcgagcgcattgagggtgttgaattcttcgcggtaaacaccgatgcgcaggcgctgcgtaagacggcggttggccagactatccagatcggtagcggtattaccaaaggtctgggcgcgggcgcgaacccggaagtcggccgtaacgcggctgatgaagaccgtgaagcgctgcgcgcagcccttgatggcgcagacatggtgttcatcgcggcaggcatgggcggcggtaccggtaccggcgcggcgcccgtagtcgcggaagtggcgaaggatctggggatcctcaccgttgcggtggtcactaagccgtttaattttgaaggtaagaagcgcatggcgttcgctgagcaggggatcaccgagctgtccaagcacgttgactcactgatcaccatcccgaacgacaagctgctgaaggtcctgggtcgtggaatttccctgctcgacgcattcggcgcggcaaacgacgtcctgaaaggcgcggtgcagggtatcgccgaactgatcacccgtccgggtctgatgaacgtcgacttcgcggacgtccgtaccgtgatgtctgaaatgggctacgcgatgatgggctccggggtggcgagcggtgaagaccgtgcggaagaagcggctgaaatggctatctcttctccgctgctggaagatatcgacctgtcaggcgcgcgcggcgtgctggtcaacattactgcgggcttcgacctgcgtctggacgagttcgaaactgtgggtaacaccatccgtgcttttgcctcggataatgcgaccgtggttatcggtacctctctggacccggatatgaacgacgagctgcgcgtgaccgtagtggcgaccggtattggcatggataagcgcccggaaatcaccctggtaaccaacaagcaggttcagcagccggtgatggatcgttaccagcagcatggtatgtcgccgctgactcaagagcagaagccggcagccaaagtggtgaacgacaatacgccgcaaaccgcgaaagagccggattatctggatatcccagccttcctgcgtaagcaagccgattaagaatcgactggaagttgggcatctgcgctctttgtgctaaactggcctcccgatagtggtgtacacttcggttggataggtaaattggcgagattatacgatgatcaaacaaaggactcttaaacgtatcgttcaggcgactggcgtcggtttgcataccggcaagaaagtcacactgacgttacgccctgcgccggcaaataccggggtcatctatcgtcgcaccgacttgaatccaccggtagattttccggctgatgccaaatctgtgcgtgataccatgctctgtacttgcctggttaatgagcatgacgtgcggatttctacggttgaacacctgaacgccgcattggctggcctgggtatcgacaacattattgttgaagtcgatgcgccggaaatcccgattatggacggcagtgcggctccgttcgtttatctgttgctggacgccggcattgatgaactgaactgcgccaagaaatttgtacgtatcaaagagacggttcgcgtcgaagatggcgacaaatgggctgaattcaaaccgtacaatggtttttcgctggacttcaccatcgattttaaccatccagcgattgatgccagcacccagcgctatacgctgaacttctcggccgatgcgttcatgcgtcagattagccgtgcgcgtaccttcggttttatgcgcgatatcgaatatctgcagtcccgcggcctgtgcctgggcggcagcttcgattgtgccatcgttgttgacgattatcgcgtactgaacgaagacggtctgcgctttgaagacgaatttgttcgccacaaaatgctggatgcgatcggtgacctgtttatgtgtggtcacaacattatcggcgcattcacggcgtacaaatcgggtcacgcgttgaacaacaaactgctgcaggcggttctggcaaaacaggaagcctgggagtatgtgaccttcgaagacgacgcaaaactgccaatggcgttccgcgcaccgtcgatggttctggcgtaagcctgaccattcagtaaattcgactggtaacctggtactctctccgaccagggagccagtcgtttttcttttatagcaccctccagttattttcgctgcgatccctggataataattagcgtgcgttcgctgctttattaagcgttttcgccgggcaatcgccttcattcatgctgcctcaggccggtattaatgttagtatttgagcgcaaaattatttctcagggttgctttaccccgtggacatcaggttgtcctgcgaaaaacatcaataaagagacagcctgaacgacgacgggtctagcaaagaaaggtaatgaacgtgagtggattgctgacgcgctggcgacagtttggcagacggtatttttggccgcatctcctgttggggatggtcgcggccagcctcggcctgcctgcgctaagcaacggtcacgagaccgcggcgccagcgaaggcgaccgccagcaatcacaatccgagcaaggttaatttctctcagctggcgctgctggagacgaatcgccggcccagctttaccgtcgactactggcatcagcacgccattcgcaccgttattcgtcatctctccttcgccatggcgccgcaggcgctgccggtggcggaagaaacttccccgctgcaggctcagcatctggcgctgctcgacaccctcagcgcgctgctgacgcaggacagcacgccgccggtggtgatccgccaggcgggttacatcccttcttcatattctgccttccgcgtcagcgcctggataagccaggtggcggggatccgcgcagggcctcaacgtctcagctgaaaataaccacggaccatcctattttttgtgactccgcaccgcggggcgtttgagattttattatgcttatcaaaatgttaaccaaggttttcggcagccgtaacgaccgtacgctgcgtcgtatgcgcaaagtcgtcaatatcatcaacggcatggaaccggcgatggaaaaactctctgatgacgagctgaaagcgaaaaccgctgaattccgcgcgcgcctggaaaaaggcgaaacgctggagagcctgatccctgaagctttcgccgtcgttcgcgaagccagtaagcgcgtattcggcatgcgccacttcgacgtccagctgctgggcggtatggtgcttaacgatcgctgcatcgccgagatgcgtaccggtgaaggtaaaaccctgaccgcgaccctgccggcgtacctcaacgcgctaaccggcaaaggcgttcacgtagtgaccgtcaacgactatctggcccagcgtgacgccgaaaataaccgcccgctgtttgaattcctgggcatgacagttggcatcaacatgtccggcctgccggcgccggcgaagcgtgaagcttacgctgccgatatcacctatggcaccaacaacgaatacggcttcgactacctgcgcgacaacatggccttcagcccggaagagcgcgttcagcgtaaactgcactatgcgctggtggatgaggtggactccatcctgatcgatgaggcgcgtacgccgctgatcatttccggcccggcggaagacagctctgaaatgtaccgcaaggtaaacaaaatcatcccgcatctgatccgccaggaaaaagaggattcggatactttcactggcgaaggccacttctcggtggatgaaaaagcgcgtcaggttaacctgaccgaacgtggtctggtgctgattgaagagctgctggtacaggaaggcattatggatgaaggtgagtccctgtactctccaaccaacattatgctgatgcaccacgttaccgccgcgctgcgcgcccatgcgctgttcacccgcgacgttgactacattgtcaaagatggcgaagttatcatcgtcgatgagcacactggccgtacgatgcagggccgccgctggtccgatggtctgcaccaggccgttgaggccaaagagggcgtggagatccaaaacgagaaccagactctggcctctatcaccttccagaactacttccgtctgtacgagaagctggcggggatgaccggtacagccgataccgaagcctttgaattcagctctatctataagctggataccgtggttgtaccgaccaaccgtccgatgatccgtaaagatatggcggatctggtctatatgaccgaagcggaaaaaattcaggcaattatcgaagatatcaaaactcgtaccgctgccggtcagccggtgctggtggggactatctcgatcgaaaaatctgaagtggtttcccgcgaactgactaaagccggcatcaagcacaacgtcctgaacgccaaattccacgccagcgaggcggatatcgtcgcccaggcgggctacccttccgcggtgaccatcgccaccaacatggcgggtcgtggtaccgatattatgctcggcggtagctggcaggcggaagtcgctgcgctggaaaacccaacgccagagcagattgagaaaatcaaagccgactggcaggtacgccacgatgcggtactggccgcaggcggtctgcacatcatcggtaccgagcgtcatgaatctcgccgtatcgataaccagctgcgcggccgtgctggtcgtcagggggatgccggttcttcccgcttctacctgtcaatggaagatgccctgatgcgtatcttcgcctccgatcgcgtgtctggcatgatgcgtaaactgggaatgaaaccaggtgaggcgattgagcacccgtgggtcaccaaggcgatcgccaacgcccagcgtaaagtggaaagccgtaacttcgatatccgtaagcagctgctggaatatgatgatgtggccaacgaccagcgccgggcgatctacacccagcgtaacgagctgctggacgtgtctgacgtcagcgaaaccatcaacagcatccgcgaagacgtctttaaggcgacgatcgatgcccatattccgccgcagtcgctggaggagatgtgggatatcgaaggtctgcaggagcgtctgaaaaacgacttcgacctcgacctgccaatcaaagagtggctggataaagagccggagctgcatgaagagaccctgcgcgaacgtattctgcagagcgcggtagaaacctaccagcgtaaagaagaagtggtcggcgccgagatgatgcgccacttcgagaaaggcgtgatgctgcagactctggattcgctgtggaaagagcacctggcggcgatggattacctgcgccagggtatccacctgcgcggctatgcgcagaaagatccgaagcaggagtacaagcgcgaatcgttctcgatgtttgccgcgatgctggagtcactgaagtatgaagtgatcagcaccctgagcaaagtccaggtgcggatgccggaagaagtcgaggcgatggaacagcagcgtcgtgaagaggccgagcgcctggcgcagatgcagcagctcagccatcagagcgatgatgaagccgcagcccaggatctggcggcgcaaaccggcgaacgtaaagtgggccgtaacgatccgtgcccgtgcggctccggcaaaaagtacaaacagtgccacggccgtctgagctaaggtctgataaaacaaacaaaggcgcagagttctgcgccttttttatggagcgcattcaatgaaaaaactgcaaatcgccgtcgggataattcgcaatccgcaaggcgaaatctttattacccagcgcgccgccgatgcccatatggcgaataagctggagttcccgggcgggaaaattgaatctgatgagacgcctgagcaggcgctaatccgcgaactgcaggaggaggttgggattacggtcaccacctcttcgctctttgataagctggagtatcagttccccgatcgccatattacgctgtggtttttcctcgtggaaagttggcaaggcgagccgtggggtaaagaagggcagccgggtcggtggatggcgggaccaacgttggatccggcggcgtttcctccggcgaatgaaccggttatcagcaaacttatcgcccagggctgagccccgggtcgcgaggctaacccgccaggcgccgggttagcttgccatcaaatcagggttgctgctcgctccagtcatcgctatcggagagatcccccgcgctggggatgcgcttctcttccgcagcccattctcccagatcgatcagttggcagcgcttgctacagaacggacgaaacggactctgctcgccccacaccacagttttgccgcaggtcgggcagttgacgatagtctcttctgacatgttatctccttaacagcaggccagttcaaaatcaaagcgctccggcacgatcccatattcactgtccagcgccaggaaacggatggcgaaacggctcttatggccggaaatttgcggataaagctggtgagccagatcgagacgcaggcgcagcagatcggcatcttcgccattatcctgataaaagccgttgaggctggtctgtttgcggaacagcgcggagttgcggataagatcgaggatcaggctcagggactggaccagcggatcgaggctggcaagccagctggccacctgctcatcgcgatgcgcctgtggcatatggagccagatatgcagggtcggtaaatcgaagctgcagcagccgccaggaatactcaggcgctgacgcaccagcgcaatcaggcgatcttcacgcagaaactgaccaatgcgcggcgcggccatcagggtgctggaggactgcttcaactggtggcgcagctcgttaatgcgctcctgatcgacgcccggcacttctgcccatgactgcagcttacgctgctggcgttccagctctttaaccaggtcagtgcgcacctcgccgcgctccaggacatccagcagatcgccggcgttacggaaaaaatggagcgcatcggcatggctggcaatctgcggacgaaaagccatctgctggatcagaaattcgatgcgcagccaggtgcgcattttctcattaagaggatgttcaaacagaacgggggtatgcattacgagttttcctgtgaggcggcctgcgatgccagcgttaaatacttttcgtgcaggcgggcaacatccgatgccactgcatccggcgtgccagtgttttcaataacatcgtccgcgacggccaggcgctgctggcgcgtggcctgggcggcaagaatatgttcagcatgttcgcggctgaccttatcgcgcagcatggtgcgttcgatttgcgtctctttcggcacatcgacgaccagtacgcgatcggcctggccggacaggcggttttcgaccagcaaaggtacgacccagaggagataaggggaggtggcggcctgcatctggcggcgcgtttcctgctgaatcagcgggtgcaacagcgcattgagccaggctttttcctccacgtgagcaaaaatttttttccgcagcaggcggcggttcagcgtgccgtcgggggcaatcatctgtggtccaaagtggccgacaatggcctggagcgccggggtaccgggctcgaccacctgacgggcgataacatcggcatcgataaccttaaccccaagctgcgcgaaggcgtcggcgaccgtacttttaccgctgccgatcccgcctgttaacgcgactgtgtaccccatatcttctgaccctgaaacggattgctcgtattttttgcaggcagacagcgatgactggcagcgcgccggggaggcgacagtgagcatgtcgttagggccccgcgccaaccgggatcgccgtccgctatactgtttgttttaatcaagcaaatcaaatggttaaaaacaatactccggcaggggaaggcataggcgcctttttctccattcaccaggtaaatttatacgattgtagcgtaaaaaaagtgaaaatcgcagtcttgcgcgggcctgattcgcgcgtatgataacgtcactggagttgtgctctcacattcatgccattaaccccaggaattcgcacatgcgtattgaagaagatctgaagcttggtttcaaagacgttcttatccgcccgaaacgctctaccctcaaaagccgttctgatgttgagctggaacgtgaattcacctttaaacattcaggcctgacctggtccggcgtgccgattattgcggctaacatggataccgtcggcaccttcagcatggctaaagcgctggccacttttggtattctgaccgcggtacataagcactacaccgctgaagaatggctggcgtttacccagggcacatccgcagacgtactcaagcatgtgatggtttccaccggcacgtccgatgcggatttcgaaaaaacccagcagatcctctctcagaacccacagctgaattttgtgtgtatcgacgtcgccaacggctactctgagcactttgtacagttcgtggcgaaggcgcgcgaagcctggccgcaaaaaactatcatcgccgggaacgtggtcaccggtgaaatgtgcgaagagctgatcctctccggcgccgatatcgtcaaagttggcatcggcccgggatccgtctgcaccacccgcgttaagaccggggtcggctatccgcagctctccgccgtgattgagtgtgccgatgcggcgcacggccttggcggccagatcatcagcgacggcggttgcaccatgccgggcgatgtggcgaaagccttcggcggcggcgctgatttcgtgatgcttggcggcatgctggcgggccatgaagagagcggcggaaccatcgttgaagaaaacggagagaaattcatgctgttctacggcatgagctccgagtcggcgatgacccgccatgtgggcggtgtcgcgaaataccgcgcggcggaaggcaaaaccgttaagctgcctttgcgtggaccggtggagaataccgcacgtgatattctcggcggcctgcgttctgcctgcacctacgttggcgcctcgcgtctgaaagagctgaccaagcgtacgacctttatccgcgttcaggaacaagagaaccgggtattcaatagcctgtaatcggctgcactggcgcctgcgcggcgccagtgtttctcatcctcccgccccgccaatggcatcgcccaggtgaaaaacgggcaaatacattgccaccaccagaatcccgaccagcgagccggttatcaccagcatcatgggttcaagatgcgcagccagactatcggctcgctgataggtttgctggcgatggtgatgcgccaggttttccagcatctgatccagcgctcccgcgctttcccccgtgcggatgagctgcaggcacagcggtgtaaaaccgccgcagcggcttaacgcctgccaaatcggctccccctgaacgatcagcgcgcgggcctgcgccagacgctggcgccacagcgggcacgacagggactcttcaacgctttgcagcccctgcagaaagctaataccggcgctttgggttaacgccaggatggtgaagatcaggctcagctgttgtccgccgatcagggagccaatgagagggagcgcgttaagcaaccgctggcggcgcagcaaccagtcgctgcgccgccggatcagctggttgagcagcagcgggctcagcagcgaggccagcagcagcggccagccgcgacttagcatgtcgcctgccgcaacgaccatccgcgtcaatagcggtagcggcgtactgaacgtctggtagatggcggtgaactcgggcaggacaaaatagagcatccccagcaccaccaacagcgccagagagagcacgatcagcgggtagcgcagcgcttttttgactttgctggcgagccgctgctgctcctgctgctgattcgccaactgcaggcagcagatatcgagcttgcccgtcagttcgccggtgctaatcatcgccagatatagtggcggaaaagcctggggccactgcgccagcgcggcagagaacgccacgccctgggccagctcgcggcctagcgcctcaagcagcgcctgccactgggcatgcgactgctgctgcgccagcagcgataacccttccgccagcggcaggccggcctgcagcagggtcgccagctggcggatcgtttcgcaactgtagcgcgggtgccagaggctctgcttcaccgcacagcggcgtacagccagcggtataactcgctgctgttggaggtgctgcaggacctccagacgcttggtttgccatagcatcccctgacaaggggcgccctgcacatcgataccgcgccagcgccagagacgcttagtcgccatgggggatccccagcacccgcaccacctcttcgaggctggtcaatccctgttcgatagcctgacagccgctttcaaaaagcgtcatcatccctgcggctcgcgccagagattcaatctcaatggcgttaagtccctggactatcccctggcgtagcccgggggtaacaggcagcacttcgaacagcgccagccggccgtaatatccgtggtaacaatgttcgcagcccgctgcctgccagcgtggcagcgggcggggccacaggctgtgcggcaggtcggcggcgctgccggcattacgccgacagtggggacacagcttgcggaccagacgctgggcgatgaccagcgagagcgcagaggaaatcatccagcgggcgatgcccatttgctgcaggcgggtcagggtttcactggtggaattggtgtgcagggtggatagcaccagatgaccggtctgggcggctttgagcgcgatttcagcggtctcggcatcgcggatctcgcccaccatgacaatatccggatcctggcgtaacagggcgcgcagcacactgtgaaaagtgagtccggcgcggggattgatttgcgtctggttcatcccggcgatggggatctccagtggatcctccacgctacagatattcacttgctcacggtttctggcctgcagggcgctgtagagggtcaccgttttcccgcttccggttgggccggtgaccagcagcagaccctgcggctggttcagcgcctggcgaaaggccgccagctgggaggatgagagtccgagtgcttccagatccagcgcctggtcaacctgatgcagaaggcgcaggacaatcttttcgccatagcggcagggcagagtggcgatgcgaaaagagagcggtcgtcccgcaagattcagcgcgaactggccatcctgcggtaaacggtgctcggcgatatcgagactggccaggaccttgagtcgcgcgataaccggtgcggccagttcgggagccagcaacggtagggcgtgaaggacgccatcgacccgcaggcggatgcgtaagtgcgtttccgtgggctcgatatgaatatcagacgcccgctgacgcagggcctgttcgaggatctggttgacccgttcggcgatattttccggcccgtcgttctgcgccagttgcgcctgcttttcctgggcctgcagacgcttatccatctgctcctggctccagcattcaatgtcgatccgcttttgcgtcgcgaagcgtagcgcctccattaactccgccggcggggtattaaccaccgcaatagagattgtctgttcatcgctatgcagcagcatggcgtggtagcgacggcagagagggatcagttgttctgttttcatgcattcgccctcacttcacccggaaaacgtcttcgcaggcctgctgaagcgcgctattgccggtgattgtgcagacgcgctgccagccggtgacgccctcggcattgtcccaggtcggcgtcagggtgacccccagtccgttcagactctcctgaccggtgagggtgacgacccctttggccacgctcatggcggagaggtagcgcgtggttgtcggcgagggaatgccgttgctgccgccgtcgcatggcgttaggccgccatgatcgagcgcgcaaagttcgatggctgtccggtaagggacaaaggtctgcagcaggtcggtgagggcggctttacgcaggtagttctggtaggccgggatgccgatggcgctaagaatggcgatgattccgataaccaccatcagttcaatcagggtaaaacctcgttgtttatccataagtcgctccttgttgtgacaggagcactgtgaagggattgaggggcgcaggcgagggggcgaaaacgatccgggaaagcgggttccagggtttttatctggatttcatggtgagcacgggcgactgcgaggcgggccgcaaattcaggccttcacgcccggaagcgtgaaggcctgttgctcagcggaagcgcatcgacaggtcgagcgcctgcacatgtttggtcagggcgccgacggaaatatagtcgacgccggtatcggcgaattcgcggatggtgtcaaaggtaacgttgccggagacctccagcgccgcctggcctgcggtaattttcaccgcctcgcgcatcaggtcggtggtgaagttatcgagcataatgatatcggccccggcttttaacgcctgctccagttcatccagggtttccacttccacttccaccggcacatcaggatgcagccagaacgccttttccactgcctgacggatcgatccggaggcgataatgtggttttctttaatcaggaacgcgtcgaacaggcccagtcgatggttggcgccgccgccgcagagtaccgcgtatttcagcgcggtacgcagccctggcagcgttttgcgcgtatccagcagttgggttttggtgccggcgagcaggtcgacatagcgacggacgacgctggcgacgccggagagggtttgcacaaagttcagcgccgtgcgttcgccggtgagcagaatacgcgacgggccttccaattcgaacagcggctggtcggctttgaccgcatcgccgtcggccacgtgccaggtgatattcacgtcgtcaccggcgagctgaataaaaacctcttccacccagcgtttgccacagaagacgccatcttcacgagtaatgaccaccgcatgggagcgtgcatcctgcggcaataattgcgcgctaatatcgttgttggcgtcgacttcgccgcccagatcttcccgcagggagtgtgcgacagcatcggtaatatcgagattaatacgttccagcagcacgtcacggcggcggtcggggttgtaacgacgaggcgacatgataaagctccagatagataagattcagaagtgggaaacatgctaacctgaacgacgtttcagtaccatacacacttcatcctttgggccggcgtgtggcccggaagcatgagttcgcgaaaggagatcccgcatgcagttgaacgaggggtggttggtcggcgcgcgtcgggttccctcgccgcaccatgactgccgtccggatgaagagaccccttccttactggtggtgcataacattagcctgccaccgggggaatttggtggtccgtggattgatgcgctgttcactggtaccctggatccgcacgcgcatcctttctttgccgagattgctcatctgcgcgtttcggcgcattgtctgattcgccgtgatggcgaaatcgtgcagtatgtgcctttcgataagcgggcgtggcatgcgggcgtctcctgttatcagggacgcgaacgctgcaatgacttttccatcggcatagagctggaaggcaccgatactctggcgtataccgacgcgcagtaccggcagctggcggcggtgacggatctgctgatcgcgctttatccggctatcgccgaaaacattgcgggccacagcgatatcgcgcccgtgcggaaaaccgatccaggaccggcctttgactggataaaataccgtgcgctgctcagcgccccgtcagaaaaggagacctcatgacgctgtttacgacgctgttggtgcttatcgccgaacggctgtttaagctgggcgaacactggcagcttgatcatcggctggaggtggcgtttcgccggataaaacatttctcgttaccgggcacgctgctgatgacgctggtggccgtcgcggtcgtgtatatcattcagcgtctgctgcaggggcagctgtttaacataccgctgctggtgttctggattttactgggcctgctatgcattggcgccggcaaagttcggctgcactaccatgcctatctgaaagcggcgtcgcgcaatgacagtcgcgcctgcgatgccatggccagcgagctgacgcttattcacggcgtgccgccgggctgtgatgagcgtgagtaccttagcgaactgcaaaatgcgctgctgtggattaactatcgatactatctggcgccgcttttctggtttgtcgtggggggcgcctggggcccgctgacgcttatcgcctacagcgtactgcgcgcctggcagacatggctggcgcgctaccagacgccgcaccaccggttgcagtccgggatcgatggtatcctgcatattgtggactggctgccggtgcgtctggtgggggtggtctatgccctggtgggccatggtgaaaaagcgctcccggcgtggtttgcttcgctgggcgaccgccattcgtcgcagtatcaggtgttgacccgcctggcgcagtattccctggcccgtgagccgcacgtggataaagtagcgacgccgaaggctgcggtatcgatggctaagaagacttcgctggtggtagtggtgattatggcgctgctgacgatttacggtaccctggtttaacggcctgagcccgcgcgctgcctgccacgatgtacgtacctgcggggcttttgttgcctgatggcgctgcgcttatccggcctggcgagtcacccgcaggctcacgtcacgtaggcccggcaagcaacagcgccgccgggcgatatatcagacgccgtactggtcatgttgccgggtggcggcttcgcctgacccggcctggagaacccgcgccagcgggtaacattccgaaccgctacagcgtatccgccggtggaataccgaagtcgggcatcccgtcttcccgccagctgaccagctttaaccgcgtatggcgattgggatcatacagcgggtcgccttctatctcggtgtaattccgcgcgtgatacaccagcacatcttccccttccggcgtttgggtaaaactattatgacctgggccatactggcggttttcatagctggtgcggaacaccggctgcggagctttatgccagtttgccggctgtagcggatcggcctgccggtcgatccataacaaccccatgcagtagttttcatcggtggcgctggcggaatagctgataaatagcttatcgccatgcatcagtaccgcaggcccttcgttgaccttaaatccccggcactcccagtcgaactccggcttgctcagcatgaccggctcgccttttaacgtccacgggttagccatttcggcgagatacaggtttgagttgccttcgatatgcggggatttttgcgcccatagataccagcgtttcccctgatgggtaaaagtggtggcatcgagggcgaaggtatcgaaaggcgtgaccacctggcctttttcctgccagcggccggtcagcggatcgctgtcagcgcactcgagaacgaacatgcgatgctggaacatccccagcgcatccagattgtgggtatgggtggcggcaaaatagatataccacttaccgtctatttcatgcagctccggcgcccaaatcagctggctcatcggcccgctttgcggcgcgcgccaaaccacgaccggctcagcatcgcgtaatccttcaagggttaccgcgcgccggatctccagccggtcgtattccggcaccgaggcaataaagtagtagtggctaagatggcgcaggataaaggggtctgcacgctgttcaataaaggggtttggccagttgttcatcaggctttccttacgtgttcactggttttcagttcctggtattcgttcagctcgctgtagttgctgcggcgcttctccagatcgctctgaatctggcgcatcagggtacggtcaaccttcagcaggcgcaccacgccggcggtgatcagatagccgacgccgggaatgactgagaatagcagcacgataccgttcagcgcggaggcgctttgcgctttcgcgccggcgtcgtagccgtaccatgacagcaggaaaccgaccattgccccggcgaccgccaggccgaccttgaggaagaacagattaccggagaagctgataccggtgatgcgcttgccggttttccattcgccgtagtcgtcaacgtcggacattagcgaccagtgtagcggggaagggatttgatgcagaatgttgagcaggaagtagagcaccataatcagcgtggtggcgtgtggattaaagaaatagaaggcgcaggagaacacggccagcacgatattggtccagaagaaaacctgcagtttgcaccagcggtcggtcaggactttcgccagcatgctgccaatcatcatcccaactacgccgaggctgataaacagggtggcaaaatgggtgctttgtcccatcacccaggtgacgtagtacatggtggcggccatgcggataaagcccggacagacgttgcacagcgtgagcagcaggatgcgcacccactggtcatttttccagacgtctttcagatcttttttcagttcgtcattcgtctgcaccgccgggcggatacgttcgcgcacggtggcgaagcagaacaggaacatacacataccgataaaggccagcacggtcatcgccatctggtagcccttcgctttatcggcgccgccgaaccagtcggccattggcagcagcgtcaatgacagcaggagcgtggcgatacccaccatgacgaaacgataagactggcaggcaacacgctctttcggatcggcggtcatcaccgttcccagcgagcagtagggaatattaatcgcggtataggtaatcgacagcagaaagtaggtcacaaacgcatagatgactttgctattgtaggtccactcaggagtggtgaacatcaggacgctgaacagggcgtaggggaaggcgatccacagcagccatggacgaaagcgaccatatttactacgggtgcggtcggcaagagcgcccatgatagggtcggttaccgcatcgatgactcgcaccgagagcagaagtacgccgaccagcgccggcgcaagtccgaatatatcagtgtaaaaatagttcacaaacagcatgatggcgccaaagataatattgcatccggcatcacccatcccgtaaccaatcttttctcttattgaaagcgtgttctctgccatgtgcggtctctccgttgcagtatggagagaattattggctgcggttggcagaaatacgttgcaggaactcgttgacgatatggataaataagctatggaggggaaagtgtgaagcagataacaatgctctgcgcccattattcaggggagggcgcagagcaaagtgaagtattgatgagatgtattattgtgcttttatggtggcggcggctttctctttaaacaggtagcccacgcccagcaccgcaatccataccgggatcagccagacggaaatcgccatccccggggtcatcagcataatcaccagcaccgccgccataaacagcaggcacagccagttgcccagcggatagaagagggccgggaaacgcgtgaccacgccctgctgctttttggcgcgacggaatttcatatgcgcgaggctgatcatcgcccagttgatgaccagggctgagaccaccagcgccatcagcagaccgaaagcagattcaggcgccaggtagttgatcagcacgcacagcgcagtgaccagggccgagacgagaatggtattcaccggcacgccgcgtttgtcgacgctgagcagcgcttttggcgcgttgccctgctgagcaaggccgaacagcatacggctgttgcagtacacgcagctgttataaaccgacagtgctgccgtcagcaccaccacgttcagagcgtttgccaccagcgtatcgccaagttcatggaagatcaggacgaacggactggtgtccgcggtgacgcgggtccacggcagcagggagagcagcaccgccagcgaaccaacatagaagagcagaatacggtaaataacctgattggtggctttaggaatgctttgctccggattatccgcttccgcggcggtgatccccaccagctccaggccgccaaaggagaacatgatgatcgccatcatcatcaccagcccgtaaaagccgtgcggcaggaagcccccctggtcccacaggttacgtaccgtcgcctgcgggccgccgttgccgctgaacagcagccagccgccgaacaaaatcatcgccactacggcgaccactttgataatcgcgaaccagaattccatttcaccgaacactttgacattggtcaggttaatggcgttgatggcgatgaaaaagaccgccgccgaggcccaggtagggatttccggccaccagaactggatatatttgccaacggcggtcagttccgccatggccaccaggacatacagtacccagtagttccagccggaggcgaagccggcaaaaccgccccagtatttgtaagcaaagtggctaaatgagccggccaccggctcttccaccaccatttcgcccagctgacgcatgatcaggaaagcgataaaaccggcgatagcgtaaccaagaatgatacccgggccggcggactgaatgacggacgcgctccccagaaacaggccggtgccgatagccccgcccagcgcgatgagctgaatgtgacggtttttcaggccgcgcttcagccgatcgccgtgctgttgaccttccatatgaaacctcgtgtgtggttattttttgtgtacgtcatccgtcaggttgctgcttcactgctgtccctgcctgaaagcatagccagcgaaaatttgggcgaagtggcccactttttacctgagtgatggcgcgcacatattgttgtgtttgtgtattcaggaacttccgtttctgtattgttttgtttacggaaggctgtgtggtaattccgaaaaaggcctttcgtctccggcagaatagtggtaagcgcgtttgaatgcacctgctttatgaagggatgatgacgatgtgtctaaaaagacatcaatagtcacaatctgtcgtattttgatgcatgctgctttgtcattatttattcactgtaaatgactctgtattcatttattgcagcgttgaatcggttcagaaagcgtaatttttcgtttctataaagttaaggctacctctttgtgagtaaacgtaacatttgtgcaaggttacatttctgaaatgttatttctgtaaggttgttaaaatgtcccgggtttactgatttcaatcaaaacctgtatggacagaaggtgaatactttgttactttagcgctacgaactttaaattggtaagaccaattgactccgggctaatggcagagacagggaatatggcctacagcaaaatccgccaaccaaaattatccgatgtgatagagcagcagctggagtttctgattcttgaggggaccttgcgccccggtgaaaaactcccgccagaacgcgaactggctaaacagttcgacgtttcccgcccctcgctgcgtgaggcgattcaacgcctcgaagccaagggcttgttgcttcgtcgtcagggaggtggaacgtttgttcagagccgcctgtggcagagcttcagcgatccgctggttgagctgctgtccgatcaccctgaatcccaattcgatctgcttgagacccgtcacgcgctggaaggcatcgcggcctattacgcggcgctgcgcagcaatgatgaggatcgcgaccgtatccgtgagctgcatcaggctattgaacgcgctcagcagtcgggcgatttggacgctgagtccggcgccgtcgtccagtatcaaatcgccgtcaccgaggcggcacacaatgtggtgttgcttcatctgctaaggtgtatggagccgatgttggcgcaaaacgtgcgtcagaactttgaattgctgtatgcccggcgggaaatgctcccgttggtcagcaaccatcgcactcgcattttcgaggcgataatggccggggagccggagcaggcgcgtgaagcgtcgcaccgtcacctggcgttcattgaggaaattttgctggatcgtagtcgtgagcagagccgtcgagagcgctcactgcgtcgtttacagcaacgaaaggacgagaactccggttcttaagcgccatttttagagcgcggcaactaaacgcagaacctgtcttattgaatttttggttgttccagcgtgaagaacgaagagttcaatgggacaggttccagattaatcaacgattagatagataaggaatacccccatgtcagaacgtttacacaatgacgtggatccgatcgaaactcgcgactggctacaggcgatcgaatcggtcatccgtgaagaaggtgttgagcgcgctcagtatctgattgaccaactcctttctgaagcccgtaaaggcggagtgaaggttgctgcaggcgcttccgccggcaactacgtcaacactattgccgttgaagatgagccggaatacccgggcaatctggatctggaacgtcgcattcgttctgcgattcgctggaacgccatcatgaccgttctgcgcgcgtcgaaaaaagatctcgaactgggcggccacatggcgtcctatcagtcttccgcgaccttctacgaagtctgcttcaaccacttcttccgcgcgcgcactgagaaagatggcggcgatctggtgtacttccagggtcacatctctccgggcgtatatgcacgtgcgttcctggaaggccgtctgaccgaagagcagatggacaacttccgccaggaagttcacggcaagggtctgtcctcttatccgcacccgaaactgatgccggaattctggcagttcccgaccgtatccatgggtctggggccgttgggcgctatctatcaggccaaattcctgaaatatctggaacaccgcggtctgaaagacacctccgaacaaaccgtttacgccttcctgggcgacggcgagatggatgagccggaatctaaaggcgctatcaccatcgccacccgtgaaaaactggacaacctggtcttcgtcatcaactgcaacctgcagcgtctggacggcccggtcaccggtaacggcaaaatcattaacgaactggaaggcatcttcggtggtgctggctggaacgttatcaaggttatctggggcggccgttgggatgagctgctgcgtaaagacaccagcggtaagctgattcagctgatgaacgaaaccgttgacggcgactaccagaccttcaaatccaaagacggcgcttacgttcgtgagcacttcttcggcaaatatccggaaaccgctgccctggtcgctgactggactgacgagcagatctgggctctgaaccgcggtggtcacgatccgaagaaagtctacgctgcactgaaaaaagcgcaggagaccaaaggtcagccgaccgtgatcctggcgcataccattaaaggttatggtatgggcgataccgctgaaggtaagaacatcgcgcaccaggttaagaaaatgaacatggacggtgttcgctacgtccgcgatcgtttcaatgtgccggtggcggatgccgatctcgaaaaactgccgtacgtaaccttcccggaaggttccgaagagcacacttacctgcacgctcagcgtcagaagctgaacggctatctgccgactcgtcagccgaagttcactgagaaactcgagctgccgaccctggccgacttcagcgcgctgctggaagagcaaaacaaagaaatctctaccactatcgctttcgttcgcgccctgaacgtgatgctgaagaacaagtcgatcaaagatcgtctggtgccgatcatcgccgacgaagcgcgtaccttcggtatggaaggtctgttccgtcagatcggtatttacagcccgaacggccagcagtataccccgcaggaccgtgagcaggttgcttactacaaagaagacgagaaaggccagattctgcaggaagggatcaacgagctgggcgcaggcgcatcctggctggctgctgcgacctcttacagcaccaacaacctgccgatgatcccgttctacatctactactcgatgttcggcttccagcgtatcggcgatctgtgctgggcggctggcgatcagcaggctcgcggcttcctgattggcgggacttccggtcgtactaccctgaacggcgaaggtctgcagcacgaagatggtcacagccacattcagtcgctgactatcccgaactgtatctcttacgacccggcgtacgcctatgaagtggctgtcatcatgcatgatggtctggtccgtatgtacggcgaagcgcaagagaacgtttactactacatcactacgctgaacgaaaactaccacatgccggccatgccggaaggcgccgaggaaggtatccgtaaaggtatctacaaactcgaaaccatcgaaggtagcaaaggtaaagttcagctgctgggctccggttctatcctgcgtcacgtgcgtgaagcagcgcagatcctggcgaaagactacggcgtgggttccgacgtgtatagcgttacctccttcaccgaactggcgcgtgatggccaggattgcgaacgctggaacatgctgcacccgctggaaaccccgcgcgtgccgtatatcgctcaggtaatgaacgacgctccggcagtggcatccactgactatatgaaactgttcgctgagcaggttcgtacttacgtaccggctgatgattaccgcgtactgggtaccgatggcttcggtcgttccgacagccgtgaaaacctgcgtcaccacttcgaagtcgatgcttcctatgtggtcgtagcagcgctgggcgaactggctaaacgtggtgaaatcgataagaaagtggtggctgacgctatcgcgaaattcgacatcgatgcagaaaaagttaacccgcgtctggcgtaagaggtaaaagaataatggctatcgaaatcaaagtaccggacatcggggctgatgaagttgaaatcaccgagatcctggtcaaagttggcgacaaagtagaagctgaacagtcgctgatcaccgtagaaggcgacaaagcctctatggaagtcccgtctccgcaggctggcgtcgtgaaagagattaaagtctccgtcggcgacaaaaccgagactggcaaactgattatgattttcgattccgccgagggtgcagccgccgctgcacctgcgcaggaagagaagaaagaagccgctccggccgccgctgctccagcggctgccgcggcagcgaaagaagttcacgtcccggatatcggcggcgatgaagtcgaagtcaccgagatcatggttaaagtgggcgacaccatcgccgctgagcaatccctgatcaccgtagaaggtgataaagcctctatggaagttccggcgccgttcgccggtaccgtcaaagagatcaaaatcaataccggcgataaagtttccaccggctccctgattatgatcttcgaagtggcgggcgctgcgcctgcagccgctccggcacaggctgccgcgccggctgctgcggctccggctgccgcagcaggcgtgaaagatgttaacgtcccggacatcggcggcgacgaagttgaagtcaccgaagtgatggttaaagtcggcgataaagtcgcggcggaacagtccctgatcaccgtagagggcgacaaagcctctatggaagttccggcgccgttcgcgggtaccgttaaagagatcaaaatcagcaccggcgataaagtcaaaaccggttccctgatcatggtcttcgaagtggaaggcgctgcgcctgccgccgctccggctcaggctgctgccccggcaccagctgctgccccggctcaggccgctaagcctgccgctgcgccggctgcgaaaacagaaggtaaaagcgaattcgctgaaaacgatgcctacgttcacgcgaccccgctgattcgccgcctggcgcgcgagttcggtgttaacctggcgaaagtgaaaggcaccggccgtaaaggtcgtatcctgcgcgaagacgttcaggcctacgtgaaagacgcggttaaacgcgctgaatccgcaccggcggctgccgctggcggcggtatcccgggcatgctgccgtggccgaaggttgacttcagcaagtttggcgaagtcgaagaagtggagctgggtcgtatccagaaaatctctggcgccaacctgagccgtaactgggtgatgatcccgcacgttacccacttcgacaaaaccgatatcaccgatctggaagcgttccgcaagcagcagaatgccgaagctgagaagcgtaaactggacgtgaaattcactccagtggtcttcatcatgaaagcggttgccgctgcgcttgagcagatgccgcgcttcaacagctcgctctccgaagatggtcagcgcctgacgctgaagaaatacatcaacatcggtgtggcggtggataccccgaacggtctggtggttccggtcttcaaagacgtgaacaagaagagcatcaccgagctgtctcgtgaattgaccaccatttcgaagaaagcgcgcgatggcaaactgacggctggcgaaatgcagggcggttgcttcaccatctccagcatcggcggcctgggtaccacccacttcgcgccgattgttaacgcgccggaagtggccatcctcggcgtgtctaagtccgcgatggagccggtatggaatggtaaagagtttgtgccgcgcctgatgctgccgatctctctgtccttcgaccaccgcgtcatcgacggtgctgatggtgcccgcttcattaccatcattaacaacaccctgagcgacattcgccgcctggtgatgtaatcgaaaaagccggcctgacggccggcttttttctgataacctcaggctgttggggattatcagcaacaaaggacaaaatcgtttgccgtttgttgtttaaaaattgttaacaattttgtaaaatacacgcggatagaacgtcccggtggacttgggcgtaagaataatagcgtcagacccgccggatataaattacagaggtcatgatgagtactgaaatcaaaactcaggtcgtggtacttggggcaggccccgcaggttactctgcagccttccgttgcgctgatttaggtctggaaaccgtcatcgtagaacgttacagcaccctcggtggtgtttgtctgaacgtgggttgtatcccttctaaagcgctgctgcacgtggcaaaagttatcgaagaagcgaaagcgctggccgaacacggcatcgttttcggcgaaccgaaaactgacattgacaagatccgcacctggaaagaaaaagtcatcactcagctgaccggtggtctggctggcatggccaaaggtcgtaaagtgaaggtggttaacggtctgggtaaatttaccggcgctaacaccctggaagtggaaggcgaaaacggcaaaaccgtgatcaacttcgacaacgctatcatcgcggcgggttcccgtccgattcagctgccgtttatcccgcatgaagatccgcgcgtatgggactccaccgacgcgctggaactgaaatctgtaccgaaacgcatgctggtgatgggcggcggtatcatcggtctggaaatgggtaccgtataccatgcgctgggttcagagattgacgtggtggaaatgttcgaccaggttatcccggctgccgacaaagacgtggtgaaagtcttcaccaaacgcatcagcaagaaatttaacctgatgctggaaaccaaagtgactgccgttgaagcgaaagaagacggtatttacgtttccatggaaggtaaaaaagcaccggcggaagcgcagcgttacgacgcagtgctggtcgctatcggccgcgtaccgaatggtaaaaacctcgatgcaggtaaagcgggcgtggaagttgacgatcgcggcttcatccgcgttgacaaacaaatgcgcaccaacgtgccgcacatctttgctatcggcgatatcgtcggccagccgatgctggcgcacaaaggtgtccatgaaggccacgttgccgcagaagttatctccggtctgaaacactacttcgatccgaaagtgatcccatccatcgcctacactgaaccagaagtggcatgggtcggtctgaccgagaaagaagcgaaagagaaaggcatcagctacgaaaccgccaccttcccgtgggctgcttccggccgtgctatcgcttctgactgcgcagatggtatgaccaaactgatcttcgacaaagagacccaccgtgttatcggcggcgcgattgtcggcaccaacggcggcgagctgctgggtgagatcggcctggctatcgagatgggctgtgacgctgaagacatcgccctgaccatccacgctcacccgactctgcacgagtccgttggcctggcggcggaagtgttcgaaggcagcatcaccgacctgccaaacgccaaagcgaagaaaaagtaactttttctttcaggaaaaaagcataagcggctccgggagccgctttttttatgcctgatgtttagaactatgtcactgttcataaaccgctacacctcatacatactttgaaaatagtcactcagtaaacttataggtagttaatgatatcgatgaggtgtgagatgaaacgctttttaaccacagcgctggtcgctgcaacgttttttaccggtgtggcttacgccgctgacgccaacattccctgggcggacaacagcggcggtacggaaacgatccacattgcggcgattggccaggatctgaatgcccagcatcagcaggtgacgaagaccaatgaaggggtatgggcggcgaattccggtagcatcagcgctgacgaagcggcattatccagcacaaaaccagcctttgccggcgatccttctctgatgcctcaccagggctaagtgaatgaaaacgcccggttgcgtgagtgcaaccgggcgttttttttaaggttctgccacctgccagccggcgtcagcgtcgggggtaaagcgcgttatctcctgtgcctttgcggcgctctcttcaccgagattggcctgatagaccctatcctgctgatcgatcataaagctcatcacgccggtttcaccccaggctatcggccaggccagcaaggcgacgctctggtcatcgcgaccggcgataattcgaaagcgatagccatggtagccgctaccgggcaccgtcgggctaaaggccggaccgagcgggcttggcgcttcgcccggcgaagttggccagtacaagccatcttttttgccttcgctactgatgattttctgcgcccagcggtggttcagatgataataatcctgctgggcatcaacataggtatgcatggcggcgatcgccgacagctcattgcggccgatggcgcgggtgaggatctcctcttcgccagcggccatatcaaagcgccatccctcagacgcttttacgataggcacgggcagacgccatgcctcgctaccgacatcgagccaggctttgtcaccctgctggatgatgacatgtttcacctgccagtcgcgttgaaagcgatcgacggcggcagggtcgatcccgtccgtgggtaaaaactgctgccagttatcgccgagtacttcgctcagcgcggcttcattaggctggctgatcgcttcggccagcgcagttgcggcctgttccggcgtggcaaactgctgttgggcgaaggcggcaagcggcgacagcattaacgtaaacagggcaacggataatgggtttctcattctgctcatccttagcggcgacgcagttcatggtgttcggaaagacgttctctggcgccctcgcgtaactcgcggtttacgccggataactggcggctctgcagtcctcgttcctgctgcgcttgccaggagggggcgcggctttcgttgccgctaagggcgttggcgcgcagatggctgagcgtctgctgacgctgggctggcgtggcggactggaactgctgccggcgctgctgctgctgaggtgtgcggttctgctcgtggctcctggcggcttctcgacgctgctgttgctgcggcgtgggggttttcagctgcgtttttgccgcctcgcgacgctgctgttgggtcggcgtgctgtcgtaaccgcggtaattactgcgttgggtggcttgcttcagctgcgccgaggccgcctgacgctgggcgtcgcgtgaggcgttgtttgccgccagattgcccgctgtggccgtcggtacgttatgctgcagctgggtcatcgctgcctggcgctgcgcttcgcgatcgactggcgcatgttgggtcgcgctcagtccgccggaaacgttggtctgatggaagcgctgagctaccgtattatcgggatacggtgtgtgtccgcgataggcaggattgtgctgccagttaacgtggtttcccggcaggttttctcctgttatatgattgaaattatttacattaatattgatgttatcgccattatgcgagtaatcgccgtggcggtagtcgtcatcgtgatggtgatggtcatcatcatcccagtcgatactgctgaacagcgcccaggtggtggccacgccgaggctgtacccgaagcctttgacgaagctatcggtaaactgctccccgggagggggcggcagatagaccggcggataggcgctgttcggccaggtaccatagacggtggaggggttatagctgggaacatagaccacctgtggattggtcggctctattttaatgacctgcgtgggcgcaggcgccgctgtgtgggcggttgcggttgctgccgtgctgctgctggctgaaaccagtgcggcaggggtgacaatcactttctgctgcggtgtggatttcagcgtcccggtttgttgggcaatggcgcgcaggcgctgcactgaatccatcacatcatgcggctgggccaaaaacgcattgccaagattttccacccagggcggatcctcgcccatcatcgccagcagggcagggaaagcgacaagagatttgacgctagggtcccacggctggctggcaaccgcctgcacggccgcatcccctttcatcgcggggttatcctgggaccactggaccgcctgcaggacgttgtcgggataagtggaggccatcaacacctgcgacagcagactgtccgggtagagcgcgataggggcgacccactgatcaatttgcgcctgggtgtaagtggcggccaccggctgtgtcgtcgacgctgcgggcgctggcgcttgctgcgcaggcggttcagcgatcgtcgctggggttcggctttgtacatagagtgttcctgccgccgcgagtaagccagcgctacagagcagggcgataatatggggtttgaacggcagtgacatggaaactcctgacccaaaaagtaacccatctcgctaaagtatctgcgaaaacggcgcgtttgctgtttgctgagtataagtaagcggtatggctttttattgattattgttgggatcggcccgtggcgttgtacgcggaaaggaatttttgtcgcgggatttgaacagaaagcctgcaatatcctgcccttaacgattcagctaaattttaatgttgcttttttgtaaacagattaacacctttcaaaaatcctgctatgctgccgacgcggtatcgggcatttaccctacaaactgctgtctcacaggagcgtgaagaaaatcgcccagccactaaatccttcaagatgcgtcacgcggcaagctaagccaggacagaggcagattgattgaagacgtgtaggccgcattatgacaatgagagcgaggagaaccgtcgtgctagaagaataccgtaagcacgtagctgagcgtgccgccatggggattgttgccaaacccttagatgcaacccaaatggccgcgctggtagaactgctgaaaaacccgcctgcgggcgaagaagaattcctgttagacctgctgattaaccgtgtaccgccgggcgtcgacgaagccgcctatgttaaagctggattccttgccgcgatcgccaaaggcgaagcgacctcccccctggttacccctgaaaaagccgttgaactgctgggcaccatgcagggcggttacaatatccatccgctgatcgatgcgctggacgacgcgaaactggcgccgattgccgcgaaagcgctctcccacaccctgctgatgttcgataacttctacgacgtggaagagaaagccaaagcgggtaacgagcatgctaaacaggttatgcaatcctgggctgacgccgagtggttcctgaaccgtccgcagctggcagagaaaatcactgttaccgtcttcaaggtcaccggcgaaacgaacaccgatgatctctctccggcgccggatgcgtggtcgcgtccggatatcccgctgcatgcgctggcaatgctcaaaaacccccgcgaaggcattgagccggatcagccgggcgtggttggcccaatcaaacagatcgaagccctgcagcagaaaggctacccgctggcctacgtcggcgacgtggtcgggaccggttcttcacgtaaatccgccaccaactcggtgctgtggtttatgggcgacgatatcccgaacgtgccgaacaagcgcggcggcggcctgtgtctgggcggtaaaatcgcgccaattttcttcaacaccatggaagatgcgggcgcgctgcctatcgaagttgatgtgtctaacctgaacatgggcgacgtaatcgacgtttacccgttcaaaggcgaagtgcgtaaccacgagaccaacgaactgctggccagcttcgagctgaaaaccgatgtgctgatcgacgaagtgcgcgccggcggccgtattccgctgatcatcggtcgcggtctgaccaccaaagcgcgtgaagcgctgggcctgccgcacagcgatgtcttccgtcaggcgaaagacgtggcggaaagcacccgcggcttctcgctggcgcagaaaatggttggccgcgcctgcggcgttgccggtatccgtccgggcgcttattgcgaaccgaaaatgacctccgtcggttctcaggacaccaccggtccaatgacccgtgatgagctgaaagacctggcgtgcctgggcttctctgcagacctggtgatgcagtccttctgccacaccgcggcctacccgaagccggttgacgttaccacgcaccacactctgccggacttcatcatgaaccgcggcggtgtttctctgcgtccgggcgatggcgtgattcactcctggctgaaccgcatgctgctgccggataccgtgggtaccggcggtgactcccacacccgtttcccaatcggcatctccttcccggcgggctctggtctggtggccttcgccgccgcgaccggcgtgatgccgctggatatgccggaatcggtgctggtgcgtttcaaaggtaaaatgcagccggggatcaccctgcgtgacctggtccacgccatcccgctgtacgccatcaagcagggcctgctgaccgtggagaagaaaggtaagaaaaacatcttctctggtcgcatcctcgagatcgaaggtctgccggatctgaaagtcgagcaggcgttcgagttgaccgatgcctcggctgagcgttctgccgccggctgcaccatcaaactgaataaagagccgatcgttgagtatctgaactccaacatcgttctgctgaagtggatgatcgccgaaggctacggcgaccgccgtaccctggagcgtcgtatccagggcatggaaaaatggctggcggatccgcagctgctggaagccgatgctgacgcggaatacgcggcagtgatcgacatcgatctggcggatattaaagagccgattctgtgcgcgccgaacgatccggacgatgcccgcctgctgtctgatgtgcagggcgagaagatcgacgaagtgttcatcggctcctgcatgaccaacatcggccacttccgtgccgccggtaagctgctggacagccacaaaggccaactgccgactcgcctgtgggtggcgccgccaacccgtatggatgccgcgcagctgaccgaagaaggctactatagcgtgtttggtaagagcggggcgcgtatcgaaatccctggctgttccctgtgtatgggtaaccaggcgcgcgtggccgacggcgcgacggtggtttccacctccactcgtaacttcccgaaccgtttaggtaccggcgctaacgtctatctggcctctgccgaactggcagcggtggcttcgctgctcggcaaactgccgacgccggaagagtaccagaccttcgtggcgcaggtggataagacggcggaagatacctaccgttatctgaacttcaaccagctggatcagtacactgaaaaagctgacggcgtgatcttccagaccgcggtgtaaaccattcggtcagcccggctgaccgtttggcgataaactttccaatgtccggtgaacattgcatcatcgggcatttttatttccaaacctcctgcctgctacgctttttttctttctgtctgctgcgataattactgcatgggtacagtgcagcggtgacgcattgcccttgcagaggaaaagactatggattacgaatttctgcgcgatattaccggagtggtaaaggtgcgaatgtcgatggatcacgaggcgatcggccactggttcaacgaggaggtgaaaggcaatcttgctctgctggacgaagtggagcaggctgcgcgcaccgtgaagggcagcgagcgttcctggcagcgtgccgggcatgaatatacgctgtggctggatggcgaagaggtgatgatccgcgccaatcagctggagttttccggcgacgaaatcgaggaggggatgagctactacgacgaagaaagtctctctctgtgcggtgttgaggatttcctgcaggtggtcgccgcctatcgtgagtttatgcagcagcgttaatgacgccttttatgtcgggtggcgcagaactacaggcccggcaagcaaaagcgccgccgggcatttcatagattacacggcaggaatattgcggccgtagtaaatctcgcgcatctctttccatagcaggtcggtaatgaccttgcgctcttcggcagtcaactcttccggtcgggtatggaacatgtagtgcttaaggtcgaactccttgagcaacattttggtatggaagatattttcctgataaacgttgacgtcgaccatgtcatacaacgacttcatatcgtcggacataaagttctgaatcgaattgatttcatgatcgataaaatgcttcatcccattgatatcgcgggtaaagccgcgcacacggtagtcaatggtcacaatgtccgattccagctggtgaatcagatagttcagcgctttaagcggggaaatgacgccgcacgttgaaacttcgatatcggcgcggaaggtgcacaggccgccctccggatggctctccgggtaggtatgcacgcagatatggctcttatcgagatgggcgaccacggtttccggtagcgggccaggatgttcggtctggtcaatcagcttgggatcgacaggctcttcgctgaccagaatggtcacgctggcgccctggggttcataatcctgacgggcgatattcaggatattggcgccaataatagaacaggtttctgtcaggatctccgtcaggcgattggcattatagagttcgtcgatataggcgatgtagccgtcgcgctcttctgccgttttggcgtaacagatatcgtagatacaaaaactcaggcttttggtcaggttgttaaagccgtgcagcttcaattttttcaatttagttcacccccttatttcgcgtcacggtgcggacagagcatcatgcagatattgtggtaaggcgaaggccgccgtatggattgccggattgtagtaacggcaggtcaggttggctttgtgaaagcgcgcctgaatgatttcgctggagagatggcgcagcgcctcattgtcgctcgcccaggcaaaggtcatgatcccgccgtaataggttggaattgccgcctggtagaagctgacgtcgcgaaaatagtggcttagcttgcgatggctgcctaccgcttcatcctgttgcaggaagcagacgccattctgggcaacaaagatcccacccgggttcaggcagcgtttgcagccttcataaaaagccgaggtgaacaggctttctcccgggccgatagggtcggtacagtccgaaatgatcacgtcaaacgtttgcgtcgtctgattaacaaaattgacgccatcatcaatcaccagcgtaaagcgcggatcgtcataggcgccggcgttatggttcggcaggtactggcggcagaatgaaactaccccggcgtcgatttccaccatggtgatggtttcgatgctacggtgacgagagacttcgcgcagcatcgcgccatcgccgccgccaatgatcaacacatgcttcgcgttgccgtgagccagcagcggcacatgggtcatcatttcgtgatagatgaactcgtcgcgttcggtggtttgtacgacgccatccagcgccatcacccggccaaaggcgcggttatcaaagatgatcagatcctgatgatcggttttttcgtggtacagcacgttatcaacgctaaaatactgaccaaaatggtcatgcagcgtttcatgccacagtggattatcggccacgataaggctcctccttcgttaacatctgttacacccgtaaaacgagtgcaacatcatagacaactatagatgaggatgcacggcggttattgcagcaatgaggcaggaataacagccaccgccccggaagggcggtggagaggatgaggctattttgccggctcgggttggctatctactatccgcacggaataaaccatggtggcgcctggcgggatttttggcggtaatcctttactgccataggccttttcaggcgggacgacgagcgtcacagagccgtggttctgtagacgcttcagcggttcgcgaaacaccgggggataggcatccagcttttgcgtaagcgcctgatctttcgcttccatatcgttgatcaccgtcccgtccgtcagcatctctttgatcaccacggtaaccaggtcgttaccgcttatttttcctttacccgggtaatcgacgcggctgtagacgccctctttaaagaccacatcttttttgcgcgcaaacgcctgctgatatttcttgccggcactgatgtttttctgctctattttattcaggttctgaaaaacctgctgtgacacatcaaacagcgccttgttacgttcctgctctccgagacgaagctggccgcgaaaggcatcttcgatgccctgcagcaccaggtctgcgtcgacggtaaccccctgagtgcgacgggtggtaaggacgttgagcgcctcgcttcccatcgaggcgccgatcgcataagcctgctgttctcccgatgcgctgagtttggcggcggcgctctcgccgctgcgcgttttggactgtacagaaagctgcgttctcagcagttcgatttcatcttctttcatccgtagctgggcgttgtctttatccgcctgcaggcgataggctgccactatggccgccatctctggtggctcattttttggcgcagcggcgtcgttagcggggccatgcggcgctttatccgcggcggccagccgggtggacagagattgtttatcggcgttaagggctttgacctgatcgagggcagcctgctgcgtcttttccgcagcggcgaggcgaatagtcagcgactgcttatcggcgttaagggctttaacctgctcgaggacggcctgtttctctttttccgcggcggccagccgggtcgccagcggctgtttgtcagcgttaagcgctttagcctggtcaagagcggcctgctgcgccttctccgcagcggcgaggcgaatagtcagcgactgcttatcggcgttaagggccttaacctgctcgaggacggcctgtttctctttttccacggcggccagccgggtcgtcagcggctgtttgtcagcgttaagcgctttgacctgctcaagagcggcctgtttctctttttccgcagcggccagttgggtcattagcgcgtgtttatctttattaagcgtggtaaagctggcgctgaggcgtttattttcagcttcggcttgctgaatctgcgtcgttaattgctggatctgctgacgcgccgcggcctggctttgctgtagattattattctgcacaacgcctgctttttttattaatgcctctttttctgcagtagcggcgcttaaggcgacctgtaattcattaattctcttattcaacgccgcttgctcattcgctccggcagtatccgtttgcggcgtagcggcaagctgtttttttaattgctgtataagcttatctttttgtgcaatcgccgcctgctggctggtgattcttttttgtaattgtgaggtgttggtaccggtttttttattatctgcgctctggcggctttcttgtgtttgttttgcgctttcggcatcgtttttttcttgcgcctgagattgctgggtttgctgttgggcgtaatcaagaaaggccggcgcggcgccggcggtgaagggggttgaaagcgccagcgcagcgacgagcatcagcaggggcgcgttgagggtcagcgtggcggctctgttcatggctgtttgctttcaccacgctgtaccaggctatcgatcagcgttttctggatatcggcgcacagtttgatggatttaaactgatacatggagtcaatgccaagccgggtaggatccgccactttctcgcgcacgctattgtattgtgacgccgcgcgcactaaagcgttaaagtcattgctgagtttagtggcttgctgtgggttaacctcttttagcgaatccagcgcctggcgacaggattcaatgcgcgcttgttcgctggccgcccgctcctgctctgcctgctgctgtgacgtcagcggcgtggcgatcggtttaaccggctggcgggaagaggtattgctacagccggctactaacagcgcggcgagtgggataacacgaaatgtcagcgagatattcacaatttcagtccatgaagtaggtatatttttaccggattctagaagggtgctttttattttgcaatatatgaataatgatattttattagttttttagtcatccttcattattatgggtttactttatttggcaaattgataggttcgcaattaaataaggtttgtttatatacaataataaatataaatatttaaagggggaaattgaaatgctaaaggcgcggagcgttgccgcccgcgcagggaattatttaacgtaagccagcaggctgagcgaatcgcgggccagcgctttacattttttcgccgtcggaatgttaatgccgctaagatcgcgatagctgtcttcgcctagcgctttcatgttgtagctgtcatagttgctcaggtcccactggttctgttgggcaaagaacaccagcgcgcgacggatctgcgtgttgggcaggttctggtagccacagtcgtttttcagaaacacaaaaaccgcggttaaatcagccatatcttccgcttcggattcgctgagcgcgtagctgttggcggagagagcaagcaggctgccgagtaccattgttctgaaaagcgtcttcattttttctaccattagatcaccgacgcttcaaattagcatacttctttacacagcgccgatctttattcttactcttctgcttgaccttcccgttacggtagggtttaagctcaaatattcgcccgcagaataaaaggatgtgaatatgcaacgtcgagacttcctcaaactgaccgccgcggtcggcatggccagcgcattgccgttatggagccgggcggtctttgccgccagtcgcccggctctgccgataccgtcgctgttagccgctgatgcgcgcaaccgcatcgcgctcaggatccaggcgggcaaaacgcggtttggcgccctgaatgccactacctggggctacaacgggtcgctgctgggccctgcgctgcagttgacgcaggggaagaccgtcacggtggatattactaaccagctggcggaagagaccacgctgcactggcatggtctggaggtaccgggcgaggtcgacggggggccacagggggttatcgcgccgggtgccacccgcacggtaagcttcacgccaacgcagcgggcggcgacctgctggtttcatccgcatcagcatggaagcaccggccggcaggtggcgatgggcctggccggcctggtgctgatcgaggatgaagagagcgggcgcctgctgctgcctaagcagtggggaatcgatgatgtgccggtgatcgtccaggataagaagttcaccgccgccggcgagatcgactatcagctggatgtgatgagcgccgccgtcggctggtttggcgatacgctactgaccaatggggccctctatcccgaacatgccgcgccgcgcggctggctgcgcctgcgcttgctgaacggctgtaatgcccgttccctcaattttgccaccagcgataagcgcccgctgtacgtagtggccagcgatggcggtctgttggccgagccggtcaaggtcgatgaattgccggtcttgatgggggaacgctttgaggtgctggtggacaccagcgacggtaaacctttcgatctggtgaccctgccggtgagccagatgggcatggcgattgcgccttttgataaaccacagccggtactgcgcgtccagccgctggtcattcccgcctccggcaagctgctggatactctggccgctctcccggcgttaccgtccctgacggggctgacgcagcgtcagctccagctgtcgatggatccgatgctcgaccggatgggcatgcaggcgctgatggagaagtatggcgaccaggcgatggccggaatggatcacggcatgatggggcatggcgacatgagcgacatggggaatatgcatcacggcgacatgagcatgaaccccggatccggcatggtgcatggcatgtcgtcaggcaagggctttgatttccataacgccaaccgcatcaacggcaaagccttcgacatgaatgagccaatgtttgccgccgccagaggccagtatgagcgctgggtgatttcaggtaaaggcgacatgatgttgcatccgttccatatccacggcacccagttccgtatcctcagcgaaaacggcaagccgccagcggcgcatcgtcgcggctggaaagacaccgttcgtgtggaaggggacgtgagtgaagtattagtgaagtttgatcatccggcgccgaaggagtttgcctatatggcccactgccacctgctggaacatgaagacaccgggatgatgttggggttcacggtttaagtctctgcgacctgctgccatcccctacgggaagaaggacggaacaccaaaaaaaacggcaactttcgttgccgttttgcgttttatttggcgtcatccgggagcgcataggcgacaatataatcgcccattttggtaccgaacgagccgtgaccgccggcagagatgacaacatactgtttgccattcacttcgtaggtcatcggagtcgcctgaccgccggctggcagacgggcttcccacagcttctcgccgttgctcatattgtacgcgcgcaggtagttatctgcagtcgcgccgatgaacaggacgttaccggccgtggagatcggaccgcccagcatcggcatccccatggtaaacggcagtttaaccggcatcgggaacggcaggctgtcctgcggagtaccgatacgttttttccataccacttcgttggttttcagatccagggcggagatatacccccaggccggctgtttgcacggcaggccgaacggcgacaggaacgggttcagcgttacgccgtacgggacgccgtactgcggctgcacgccggactcggtaccagagcctttcgcatctttcggcggctccatcggattgcctggcccgcgcgggatcagttttgagacgaaaggcagcgccatcgggttggcgatagccacctgacggttcggatcgacggagataccgccccattcaaacatccccaggttacccgggaacaccagcgtgccctgctcagacggcggggtgaagataccttcatagcgcagctggtggaagatcacgcggcacaccagctggtcgaacatagtggcgccccacatgtccgcgccggtcagatctttcttcggacggaagctcagatcggagaagggctgggttttggtaacgtaatcacctttggcagcgccctgcggtactggtttttccggcgccgggaccaccagctcgccgttacgacgatccagcacgaagatgttgccggttttcgccggggcatagatgaccggtacggttttgccgttgacctcaatatcagccagcgtcggctgggaaggcatgtccatatcccacagatcgtgatggacggtctgatagctccaggccagcttaccggtggtggcgttcagtgccacaatcgagctggcataacgctcttgctccggcgtacggttgccgccccagatgtccggagtggtcacgcccatcggcagatagaccagatccagcttagcgtcgtaggcggcaggcgcccatgagttcggcgagttgagcgtgaagtgatgttcatcgctcgggatggcgttcggatctttcgcacccggatcgaaggcccacagcagtttaccggtattcacatcaaagccgcggatcacgcctgacggctcgcgggtagagaagttatcggtgaccgcgccggcaatcacgatggttttatcggtgatgatcggcggtgaagtgggttcatacatgcccggcgtggtgaccggcatgttggtctgcagattgagaatacctttattagcaaaggtttcgcacagcttaccgttgtcggcatttaccgcgaacaggcgaccatcgttcaccggcaggataatgcggcgcggacagtcggcgacgacgtcggcaggggcgttatccgctttcgcttcgtgataagaaacaccgcggcaggtgacgtgctggaacgacggatcggcgttcagctgcgggtcaaaatgccacttctctttaccggtggcggcgtccagcgcaaacaggcgctggtgagcggtacacaggaagagcgtatcgccgactttaatcggcgtcacttcgttagtgatttcacccggatcgttcggctgtttcaggtcgccggtgcggaacacccaggcttccttcaggttcttcacgttatcggcgttaatctgcttcagcggggagaagcgctggccttcctggttacggccataggccggccagtcgccgtcggcgacggtggaaatcggtgcggccggcgtagcgtcggcgctcagggtgccgttgacttcctgcgggtcgttaaaaacagcccaggtcagcatgccgccgctgatcagcagggcgacgaccagcgcgccaacggcgccagcggaaggcaccggcagacgacgccagacaaagggcaggatcagccagatgccaaagaagacgaggatatcgctacgcggcgtcaacgcccagaagtcgaaaccaacttcccagacgccccagatcatggtcgccagcagcagcgcggcgtacagccacagcgcagcgcgcttgccgcggaacagcattacggtcacgcccagcatcaccagcccggcgatagggtagtaccaggagccgccaagcacgaccagccatgccccgccgattaatagatagaggccgcagaacgctgcaaatagcgcagtcagcgtcaccaggagccttgattgttgagactttgtttcagccataaaaagttactcatgtgtttgttaaattttttaactgcaattaattataggatttaacaagtgtgatcggaatcacaaatatggctttattaatccctgcaccgaagatttctttttgctggtatactggatggcttgccggtcatcgtcggggcgaaagcagcggctttgatgatttatatttagaatcaaatggttagtattatgaaacatactgtagaagtgatgatcccggaatccgagatcaaagcgcgtattgcggaactgggtcgtcaaatcaacgaacattatcagaacagcggcagcgaaatggtgctggtggggctgctgcgcggctcgtttatgttcatggccgacctgtgccgtgaagtgcaggtgccgcatgaagtcgattttatgaccgcctccagctacggcagcggcatgtccaccactcgtgatgtgaaaatccttaaagatctggatgaagacatccgtggtaaagacgttctgatcgtggaagacatcatcgactccggcaataccctgtctaaagttcgcgaaatcctcagcctgcgcgagccgaaatcgctggccatttgtacgctacttgataaacccagccgccgcgaagtgaacgtcccggttgaatacgtcggtttcgcgattccggatgagttcgtggtgggctacggtatcgactatgctcagcgctaccgccatctgccgtatatcggcaaagtcaccctgctggacgagtaaggggatatcccactctggacagcgcgcgccgcgctctccagggtggcgaagtctgaaggctatctgtggttgatgtgcttgatcttgaggttggagatcccgtggcgatagcgctgttcgagggtttccctgctcacagcggtgacatccagatcgcgcagcagtccgtcgtgaatcccgtaagcccagccgtggatggtcaccttctgtccgcgcttccacgcggattgcataatcgtcgaatgtcccagattgtacacctgttccatcacgttcagttcacaaagggtatccagacggcgctcctctggcatttcaccgagcagcgagctgtgcttaaaccagatatcgcggatatgcagcagccagttgtcgataagccccagctccgggttctccaccgccgcctgcacgccgccgcagccgtagtggccgcagataataatgtgctcgacttccaggacatcgacggcatactgcaccaccgacagacaattgagatcggtgtggatcaccaggttcgctacgttacgatgcacgaacagttcgccaggctccaggccggtgagtcgctcagcgggaacgcggctgtccgaacagccaatccacaggaagcgcggtttctgcgtctgcgacagtttctcaaaaaagccggggtcctcttccaccagcatttttgaccatagtgcattgttgctgatgagtgtatctatatcattcatggacgttatcggcctgtaaccaagtaagtgcgttgcgctaatatagggtaagctcaccttttttaaaaccatcttaacccgtgatacttcaggctgcagatgcgttggcggcgtcagcgccggtccagcgcaaacgtgagtcaggcgggttaatgacgtgtcacgacacgagaagagatatttaatgaccattgctctggaattaaaacagctcaaaaaaacctatcccggcggggttcaggcgctgcgggggatcgacctgcaggtcgaagcgggggatttttatgccctgctgggcccgaacggggccggaaaatccacgaccatcggcatcatcagctcgctggtgaacaaaacctctggtcaggtcaatgtctttggctacgatctggagaaagacgtcgtcaatgccaagcgccagcttggcctggtgccgcaggagtttaacttcaacccgttcgaaaccgtgcagcagatcgtcgttaaccaggcgggctactacggcgttgagcgtaaagaagccctttcccgcagtgaaaagtatttaaaacagctcgacctgtgggaaaaacgcaacgaacgcgcgaggatgctctccggcgggatgaagcgccgtctgatgatcgcccgcgcgttgatgcatgagccgaagctgctgatcctcgacgaaccgaccgccggcgtcgatattgaactgcgtcgctcgatgtggggctttctcaaggatctcaacgatcgcggaaccaccattatcctgaccacccactatctcgaagaggccgaaatgctatgtcgcaacatcggcatcatccagcacggcgagctggtggaaaacacctcgatgaaagcgctgctgtcgaagctgaagtcagagacctttattcttgacctcgcgccaaaaagcccggtgccgaagctcgaaggctaccagtaccagctggtcgatacctcgacgctggaagtggaggttctgcgtgagcagggaattaacagcgtcttcgcgcagctgagcgcccagggggtgcaggtactgagtatgcgtaacaaagctaaccgtctggaagagctgtttgtcacgctggtgcatgagcgaaaaggagaatcagcatgatgcagctttattgggtcgcgctgaaaagcatctggaccaaagagatccaccgttttatgcgcatctgggtacagacgctggtgccgccggtgatcaccatgaccctgtatttcgtgatctttggcaacctgatcggctcgcgcattggtgagatgcatggttttacctatatgcagtttatcgtcccaggcctgatcatgatggcggtgatcactaatgcttacgccaacgtcgcctcatccttcttcagcgccaagtttcagcgcaatattgaagagctgctggtggcgccagtgccgacgcatgtgattatcgccggctacgtgggcggcggggtagcgcgaggactgtgcgtaggtatcctggtgaccgcggtgtcgctattctttgtgccgttccaggttcactcctggctgtttgtcgccctgacgctgctcctcaccgcggtgctgttctcgctggccgggctgctgaacgcagtgtttgccaagaccttcgatgacattagcctgatcccgacctttgtgctgacgccgctgacctatctcggcggggtgttctactcgctgaccctgctgccgccgttctggcaggggctgtcgcatctgaaccccatcgtctacatgatcagcggttttcgcttcggcttcctcggtatcaacgacgtcccgctggcgaccaccttcgccgtgctggtggtgttcatcgtcgccttctatctgctgtgctggtcgttaattcagcgcggtcgcggcctgcgtagctgatactcatcatggttagcgcttcctgaagtaaatatgcgaagcgctaaccgcttatctttgactcccatcaccgatacgtcatcttcaccttgctacattattcgctggctaaggagggaagcatgctcggatgggtcattacctgtcacgatgagctggcgcaggagatgctggatcgtcttgaacaaaagtttggtccgctggcccagtgccgggcggtcaattactggcgcaatctcagcagcaatatgttgagccggatgatgtgcgatgcgctgcatgccaccgactccggggacggggtcatttttctcactgacaaaaccggtgcggcgccttatcgggccgcggcgctgatgagccacaaacatacccactgcgaagtgatctccggcgtcagctatccactccttgagcgaatgtatctcctgcgaggcacgttaagcagcgtggcgtttcgccaggcgatcgtcagcgcgggcgggccgatggtgagcagcctgtggcatcagcagcagaagaaccccccgttccggttgcgccatgatgcctggggaaattaagcagcgggacagataccgcttttgttacaataaccgccgttgatggtataacggtttgatgcgtatgcttgcccgatttttgaccctgcttcttttcctgacctcactcagcgcctccgccagcctgcttagccagcagggcaaggctgtgcgctatatgcaaaccaccgaagacgcggtcatctgggcgcaggtgggaaaccatgtggtcagcgtcggcaatgttcgtgccgggcagatcctcgcagtcgtcccgacggcggctgactactatgagtttcgtttcggctttggcaccgggtttattgataaagggcatctcgagccggtgcagggcaagcagcgggtggaggaccgtttgggggatcttaataaaccgctgagtaaccaaaatttactcacctggaaagatacaccgctctatgacgctccctcggtaagcagcgcgccgttcggcacgctggccaacaatctgcgctatccgatcctcagcaagctgaaggaccggctcaatcagacctggtttcagatccgcattggcgaccggctggcgtgggtcagtagtctggacgcgcaggaggatcacggtattcccgtgctgacctatcaccatattctgcgcgatgaagagaacacccgttttcgtcatacgtcgaccaccacctcggttcgcgccttcacgaatcagatgacctggctgcgcgatcagggctataccacgctgaccctgtatcagctggaaggctatgtgcgtaataaaatcaatctcccggcgcgggcggtggcgatcactttcgatgatggcttgaaatcggtgaaccgctacgcctatccggtgctgaaacagtacggtttccatgccaccgcgtttattatctcctcgcgtattaagcgccatccgcagaagtgggatccgaaatccctgcagtttatgagcatttccgagctacgccagatccaggacgtctttgatattcagtcgcatactcacttcctgcatcgggttgacgccggccggcggccgattttattcagtcgcaattaccataatattctgtttgatttcgcccgctcgcgccgggcgctgagccagtttaatccgcacgttctctacctttcctatcccttcggcggctataacgctacggcggtgcaggcggcgaatgacgccgggtttcatatggcggtaacgacggtgcgtgggaaggtgaagccgggggacaatccgtttctgttaaagcggttatatatcttacgcacggattcgctggagacgatgtcgcggctgatcagtaaccagccgcaggggtaataccgacgctgcgcctgagcgcagcgtcgcggccatcaggcgacctgtaccggaatagctttcgcctggcgcttcatttcgttgtcgccttcgaagtaggcgatgttaggctgccagctgcgcgcctcttcgtccgacatggtaacgaagctggcgatgatcaaaatatcgccgacgctggcgcagtgcgcggcggcgccgttaacggagatgatccgggagccccgctcggcggcaatggcgtaggtggagaaacggttgccgttggtgacgttccagaggtgaatagtttcattctccagaataccggccgcatccaggaagtcctggtcaatggcgcaagaaccttcatagtgcaggtccgcctgcgtgacttttacgcggtggagcttgccctgcagcatattacgcatcataacttctacccttcaaccttaatgtagcagagcggacacggcgcccgccctgagaaaagcccgggcagtattgcccgatttttacccgctgtctactgagcgagcgtgacgatccggttgtcgatcaggcgagcctgccccagccaggcggccatcaggatcaccgcgcgctggctggcatcggtcagctcaagcagggtgtcggcatcgcggatctgaatgtcgtcggcgcggaagcctttctcattcagctcctgttcagcgatagcgatgatctcatcgagctgccgatcgccggcggccagcttttccgccaccgcgctcagcactttatacagaccaggcgcgattttgcgctggtcggcggtcaggtagccgttacgcgaactcagcgccaggccatctttcgcgcggacgatcggcacgccgatgatctcaatgtcgtagcccatatcggcgaccatcttgcggatcagcgccaactgctggaagtctttctcgccgaagcaggcgacgtctggttgaacaaggttgaacagcttactgacgatggtcgacacgccgcggaaatggcccgggcggctggcgccttcgagcatggtggataatcccggaacgtcgacgtaggtctggccttcagtaccctgggggtacacttccgccggcgtcggcgcgaagacaaagtcgacatgacgtttgttcagcttttcgcaatcatcctgtaaggtgcgcgggtagcgcgccaggtcgtcgacgcggtcaaactgcatcggattgacgaaaatactgaccaccaccacgtccgcactggctttggcttcatcaaccagcttcatatgaccatcatgcaggttgcccatcgtcgggaccaacgcgatacgcttaccctcctgacgcagacggcggatatgctgccgcagcagcagtacggattcaataatcagcacaacaagactccttaatggaaactgtgttcttcgcccggatagactccggattcgacttcggcaatatactgccgcaccgcggcgcggatgtcgcccgcttcggcaaggaaattcttggcaaatttaggaatgtggccgccggtaatgccgaaagcgtcatgcatcacgaggatttgcccgtcggtgacgttgcccgcgccgatgccgatcactggaatggtcagagcgtcggtgatgcgcttcgccagttcaaccggcacgcactccaggaccaatagctgcgcacccgccgcctccagcgctaacgcgtcttcaaacagggtctgcgccgcatcgccgcgaccctgcactttatacccaccgaatacgttcaccgactgcggcgtcaggccaagatggccgcaaaccggcaccgcgcgctccgccagcatcctcacggtgtcggccagccaggcgccgccctcgagtttgaccatattggcgccagcgcgcatcacgatggcggcatttgcaaaggtctgctcgggggtggcataggccatgaacggcaggtcggcaagcagcaggctgtttggcgcgccgcggcggacggcgcgggtgtgataggcgatatcttccacggtaaccggcagggtggagtcgtgaccctgcaccgtcattcccagcgagtcgcctaccagcagcacatttatgccttcatcggcgaacagcttcgcgaagctgtgatcgtaggcggtaatggtggcaaagcgcttcttttcctgtttgcatttctgcagcagggcaatggtggtcggtttcataacatttcctgatgatgaaagtcatattaaccggcattctaacagcagcattcagaggggcaatgattttgggcaaccgattacgacgatcgccgcaaatgctaaaaaagggagaggggattaccagctggcgggctttgccgcgccgagattatccagcacggcgcgcagcgccgggccgtcaggaaagtgaaggtccggggcgatctcgaacagcggccagagcataaagccgcggtttttcatatcgtagtgcggaacggtcaggcgctcgctgttaatgacagcatcgccaaacagcatgatatcgaggtccagcgtgcgcggcccccagcgttcggctttgcgcactcgcccctgctgcagttcgatgcgctgagtatgatcgagcagcgtctcggggggcagggcggtttccagcgcaacggcggcgttgagatagtccggctgatcctgcgggcccagcggcggcgtgcggtagaacgaagagacggcgaccacgcggctgtgcggaatttcgcccagggcgcggatagccgcctgcgcctgctccagtggagaagcaaggttgctgccaagagcgatatagaccagagtcatgcgctaccctggcgcggcgcgcgcttgcgcggacgacggtgacgacggcgcggcgcaggatcgtccccgaggtcgttgagcatatctttttgcgccggcggtgcggcgacctggaattcgccccaccatttggtcaggcgctgcagttcgtggttgttctcggcgccggcgcgtagctccagcaggtcataggcggcgcggaatttcggatgctccatcagcttccaggcgcgtttgccctgacgacgggacatgcgcagctgcagctgccagatatcacgaataagggtggtgatgcgcttagggatcgccagcgtacggcaggcttcgtccagcacatcgttcattgccagggcgaaggcgtcgtagtacgccaggccgctctcctgagcgattttttgcgccgtctccagcagcggataccagaacatcaccgcgaagaggaaggccggattgacgcgcatatcgttatgaatgcgggtatcggtattcttcagcacctggctgatgatccgctccatcggactgtcgccgcgctcggtaaagtagcgggtgatggtcgggaacagcggctggaacaggctgtattcccgcagcagcatgtaggtctggtagccatacccggcctgcagcagcttgagcacttcttcgaacagacgcgccggcggcacatcgtggagcagggcggccaggcgcggcagcggttcagccgtttccgggctgatggtcatattgagcttggcggcaaagcgcaccgcgcgcagcatgcgcactggatcctcgcgatagcgagtttccggattgccgatcaggcggatcacgccgtcctgcagatccttcatgccgccgacgtagtcgcgaacggtaaagtccgccacgctataatagaggctgttgatagtgaagtcgcgacgctgggcatcctcctcgatcgagccgaagatgttatcgcgcagcagcatgccgttctggccccgctgggaagtgacgcgatcggtggtatgcccttcgtgatggccacggaaggtggcgacctcaatgatttccggcccgaacatcacatgcgccaggcggaaacgtcgcccaaccagacggcagttgcggaacagcttgcgtacctgatccggcgtggcgttggtggtaacgtcaaaatcttttggctttttgccaagcagcaggtcgcggacgccgccgccgaccagccaggattcgtagcccgccttgttgaggcggtacatgaccttgagggcgttttcactgatatctttgcgggaaatagcatgctgctcacgcgggatcaccgtcataggcgttggttcgacggcggcttctgcctcgcgctcctcacggcttagcaccttacggcaaaaattagcgactcgggtaaaaatggtgcacctcgtagtgtcagacggacttcagatcaactgtacagtgtaaaaatagcggctaatcatagctcagcgggagccatttgagaatgctcgattttcgccggctgccagttggcgacggcctgggcgagtaaattatcgatgctcagggcctgccactcctcggggatcgcctgattcagaaagcggagcgcccggacgatttcggggcgcggatcgccttccggcagcgccggcgcgtggttttgtttagagagtttattgccgtcgccattgagagccagcggcagatggaggtaatccggcgcctgccagccaaaatgctgatacagcgaaatctgccgcaccgtcggctcaatcaggtctgcgccgcggacaatctcggtgatcccctgaaagtggtcgtcgaccaccaccgccaggttgtaggcgaacagcccgtcgcgacggtggataataaaatcctcacgcgccagcggctcattggcgatgagcgtgccgcgcagacggtcgctaaactgcagcaccggacgggtttggcgcaggcgcagcgcggcgttttccgcccccagcccgagatcgcggcagtggccgtcgtagatcccgcccacggcgtggatccgcgcgcgggtgcaagtgcagtaatagctcagcccttgctcgcccagccacgtcagcgcctcgcggtaggcttcgtgccgttgcgactgccacagcacgtcgccatcccagtgcagaccgtagtggtcaagctggcgcaggatggtatcggcggcaccggggacttcgcgcggcgggtcgatatcttcaatacgaacacgccagataccctggttcgcgcgggcttgcaggtagctgccgagcgcggcgatcagagagccgaagtggagttcgccggagggggagggggcgaagcgccctatatagcgtgagtcagtcatggtacggacaacagaaccaggcgggagagactcccgccagagagtgaggcagcaggggattagcccgccatctgtttttcgcgaatttccgccagggttttgcagtcaatgcacagatccgctgtcggacgcgcttccagacggcgaatgccgatctccacgccgcaggattcgcagtagccgaagtcttcgtcttcaacttttttcagcgttttctcgatctttttgatcagtttacgttcgcggtcgcggttacgcagttccaggctgaactcttcttcctgggcggcacggtctaccgggtccgggaagttagctgcttcatcctgcatgtgcgatacggtgcgatccacttcatccctgagttgattacgccatgcttcaagaatacgcttgaagtgcgccagctgggcttcgttcatatactcttcgcccggtttctcttggtacggctccaccccagcgatggcgagaatactcagggacgatgttttacggttttgcccttcttgcatgttgcttctccttaacacgcactatcgatccccatgtgggggaaaatcaggccgctataaatagcagatgcttttccggatagcaattatctaaacgttacacttgacaaccctgtgaagaaaagcgtattcgcgcttgcgacccgaacactatttagccacttatttaccggggtttaacaccacggcgatcggcttattcagagtcatcctcgtcgtagaaagttccgctttccaggcgagaatttccacccccttgtcctgggcttctgttaacagctgtgcgtatctggcatcaatatgatgcgcgggagaaaaacggtcaattgccgaatgcaggacggcaaataaaatcaccgcgcggtcgccatttgccgcgacggccatcagttcccgcagatgcttctgaccgcgcgtggtcaccgcatcgggaaaataaccgtattctttctccgccaacgtaaccgatttcacttcaatatagcagttttgtcggtcatctgcctgtaacataatatcgatacggctattctcttcgccatatttcacttcgcttttcagctggttatagcctgaaagttcaggaattattccggcggaaatcgcctcttttgccaaagaattcgcgcgcagcgtattgacgcaaataactgcgccctgctgggtttcagttaattcccaggtgtgggcatatttgcgcttcgcattgtccgaggtggaataccagacggtgtcgcccggggcggcgcagccggtcatcgccccggtattcgggcagtggagcgtcagctcgcggccatcgggggtgaccacgtcagcaagaaatcgtttgtaacgtttaagcaaaatggcgggctgcaacggcggatcaaactgcatcaactttccttatcaaacggataacgttccagcgccgtgtagcgcgtgcgcccccggctaaagctggactcatagagcacgaactcgttcaccggaaacgtccagcgaaagccgggggccgggatcggcaccgcctggcgagcatcgcgccacagggtaatatgcgggtgaaacggctgcgggctctgatagcagccgctgcgcgccgcctgagcgcgcaacatgctggcgagctgcagcaggccgcgcggcggctggcgggttccgagccacaccactcgcgaacgtagccactgtccggcatcgtccagcgtcagggtaaagcccggctggcgcaggcgaccagcgagagcggccagcgcccgctgtttttccgcgctcacctcgccgagaaacgccagcgtcagatgaagattatccgccgcgacgggcctgccggcatcttcggggaagtgcgttgcccgccactggacaatctgcttctggacggcagacggcagttcaagcgcaaaaaacagccttttcggctcagacatgatagagactcggtaatgaattagggggatgctacaatgcgaacccctgaatgttaacccccggagccttttgtgtcctcattgccggttgccgctgtccttccagaactgttatccgccctgcagcatgcgccgcaggttttgctcaacgcgccgaccggcgccgggaagtcgacctggctgccgctgcagatcctcgccgagggcaacatcgcgggacgcattatcctgctcgagccgaggcgcctggcggcgcgtaatgtcgcgcagcggctggctgaactgcttggcgaaaagccgggggagaccgtgggtttccgcatgcgcgccgaaacctgcgtcggaccgcagacccgcctggaggtggttacggaggggatcctgacgcgcatgatccagcgcgatccggagctgacgggcgtggggctggtgatcctcgatgagtttcacgagcgcagcctgcaggcggatctggccctggccctgctgctggacgtccagcaggggttacgtgacgatctcaagctgctgatcatgtcggcgaccctcgataacgatcgcctgcagcgtctgctgccggaggcgccggtggtggtctcggaggggcgcgcttatccggtggagcgtcgcttcagcccgctctccgcgcaccagcgttttgatgaggcggtggcggtagcggtggcggagctcctgcggcatgaacagggatcgatgctgctgtttctgcccggcgtcggcgagatccagcgcgttctggaacagctgacggagcgcgtggcggaggatgtcattctctgcccgctgtatggcgcgttgcccttaagcgaacagcgcaaagcgatcctcccggcgccggccgggaagcgcaaagtggtgctggccaccaatattgccgagaccagtttgaccatcgaggggatccgcctggtggtcgacagcgcccaggagcgggtcgcccgctttgacccgcgcaccggcctgacccggctggtgacgcagcgcatcagccaggcatcgatgatgcagcgtgccggacgcgccggtcgtctctccccggggatctgcctgcatttgctcggcaaagaacaggcggaacgggcggcggcgcagagcgagccggagatcctgcacagcgatctgtcggcgctgttgctggagctgctgcagtggggctgccacgatccggccgcgctggcctggctggatcagccgcccgcggtcaatctggccgccgcgcgccgcctgctggaggcgttgtcggcgctggacggcgagcggctgtcggcgtttggccgcaaaatggcagcgcttggcaacgagccgcggctggcggcgatgctggccgccgcgcagaccgatgacgaggcggcgacagcggcaaagctggcggcgctcctcgaggagccgccgcgcggcggactggtggatttgggggccgtcttttcccgtcagcaggccaactggcagcagcgatcgcagcagctgatgaagcgcctggcccgccgcggcggccagcccgatgccgggctaatggcggggctgctggcgtcggccttcgccgatcgcatcgcccgccgccgcggtcaggaggggcgctaccagctggcgaacggcatgggcgcgatgctggacgccgacgacgcgctgggccgtcatgaatggcttatcgctccgctgctgctgcagggcagcgcttcgccggatgcccgcatgctgttggctctgccagtggaaatcggcgagctgatcgccgcccgccctgaactggcgaaaagttccgacacggtggagtgggatgaagcgcaggggacgctgaaagcctggcggcggacggtgatcggccagttggtgatcaagacccagccgctggcgaagccctctgaggcagagctgcatcaggcgatgctcaacggtattcgtgagaaaggcctcggggtgctcaactggacgccagaggctgagcagctgcgcctgcggctgcactgtgcggcgcagtggctgccggaagaggcatggcccgcagtggatgacgcttcgctgctggcctcgctggaggcatggctgctgccgcagatgaacggcgttcattccctgcgggcgctgaaggcgctggatctgcgtcaggcgctacaggactggctgccatggccgctgcgccagaagctggatcgcgagctgccgacgcactataccgtgccgaccggcagccgcctggcgatccgataccatgcggagaacccgccagcgctggcggtgcgtatgcaggagatgttcggcgaggccacgacgccggtgatcgccgaggggcgggtgccgctggtgctggagctgctgtcgcctgcccagcgtccgctgcagatcacccgcgatctgagcgccttctggcaagggagctaccgcgaggtgcagaaagagatgaagggacgctatccgaagcacgtctggccggacgatccggccaacgccgccccgacccgccgcagcaaaaaatactcgtagccgccgctgccgggcggcattctgcccggccagtcggttcgcaaacgctagaccatctgctgccagagaaaaatacccccgccggccagcgccagccaggggccgaaggccagcggctgctgcagcgactgccgggtccacaggcgttgcagtagggtccacaccagcccgctggccgaagcgagcaacagcacctgcggcagaacctgccagccgcaccaggcgcccagcgccgccagcagcttaaaatcgccatagcccagcgcctctttcccggtcagcaggcggaacagccagtagaccgaccacagcgccagataaccggccatcgccccggcgaccgcatccggcagggcaatgtacacctcgttaagattgaacagcagcccggcccacagcaggggcagagtcaggcgatcgggcagcagctgggtccgggcgtcaatccgcgccagtatcagcaggaacgagagcagcaccaggccgcccgccagcggcaggcccggcgccagcaaagctccggcgaggataaacagcaggccggtggccagctcggtcagcggatagctccacgcgatgggcgcctgacagcagcgggcgcgacggcccagccagaggaaactgagcagcgggatattgtcccgccaggcgatcggctggcggcactgcgggcaggaagagcccggggtgctgagggttatccgctcgtcgtccgcggtctgggtcaacatgcgcggcagacgatagatcaccacattgtaaaagctgcccagcgccaggccgaacagcagtagaaagccataccagacaaagggaaagtgcagcgataacgcggctagtgtcgtcatttttgctcctgtggtaaccattttccctgcagctgccacggcgtcgggcccggggcgttattcgctgtcgggcgcgtgaccagcagcgccagcagcggtggcattccctgccggggctgtagcgtgccgcgaaacagatagcggccatcgggcgacagagtcccctggccgctgaggctcagctgatgagagtcctgacggagagtcagcgccacggcgccgtccaccgtacagcggaaggtgccattaacctgggccagctccaggctgccgaccggggagtgcagtcgggcctgccgccactgcgcgcctccggcgatgatatgccggcagcgtccgtcactgaaccgcccttcggtcaggctgaaggtgacctcccccgcggccttgacgggcatagtcgacatcaaccagcggctgagcaggctggcgggggcggtgagccgcccctcctgtaggcgcagatcgcgaaggccccacagccgggcctgacccatcacgccgcggggatcgctgagagagacctgccagcccgccagggtcagcgaccacgccagtcgttcaagccgttccccatgccagtagaccggttgcgccgcgccgcgccagacgctgccgctaaattgccccacctgtacgccgggcggcagcatgggagccagcaggcgcgccggagcggtggcggtgagccacaacagatagaggaccagcagcagtccgcccgcgatccagttagccttcatcgtcgcgctccagcagcagatggttgaccgtgacccagccgggtcgcgacggctgcccggtcacggacagcgagatcgcgttgacgccgcgcatcgccggagcgtccagccagtcgatcagcgcctggaaagcgcagggctgaagggtgatctgcagacgttttccctgcggctgcaggcggatgaccgtcagtccgtggctcgccgcctcgcgcatcaccagcgcggtgagcgcctcttttgccgccggcgcgggctgctggctgagctgctgcaggcgcggagcctgctccgtcatccagcgcaggctggcctgctctttcaccagggtttgccgccactgcgcctcgcgggctcgccagggctgccacagcccataccagaaggcgcatgccgccagcagccctgtcagaccaagcaacaggcgctgctccgacggcgtgcgctgccgccaccagataagcagattagccatcgttttcctccagcgtcagttgtccctcaatgccatccggtttcgtgatcatgtcgcccggccggacgcgaaaccgcggctgcgcccgctgggtaaactgctccagcgcccgggaagtgaccgcggcgatatccagctgcagacgattgcccgcggcatcccagctcagcgctcgcagacggatccccggcgtttcgctgaggatgttttgcaaggcgctgaggcggtcgacgaggggggcatgctgcgcctgacgggtgagggtttgcaggtgctgctgcatctgcagtcgtgggttaatcacctttttctccgtcggaaaccagcggtgatagaaggcccggctggcctgttgcgccgcctcggcctgacgcgccagatcgcgatggtccagcacgctgtttgcccctgccagtaacgccagagccagcgcggcataccgcgccggacgccagctcgcctgcgcagaccgccgccggacggcgaactccccctgcagcagactgagtttctgcgctgccggatggcgtgcggcaagggtcagcaatgtctgcgcaggctgctcccgccagacgcccggcgccgcgggcggcggcgaatagctgtcgatgacgtgctcttccgcctcgctctgcagcagctccgtcagccagacgttttccgccgccatgccgccccacggctggtggcggatcagccactgctcgtccacctgcaccgcgctccacgccggcggttgccagggcagggccagcacgtcgggcgtcaacgccaggggctgtaaggagagcgattcgcagcgcgccagccagtcgcgcattttttgccgctgtacggcgacgatctcgcactgggcctgctggcggtggagcagggcaaaatgggtggcttccacatcgtcggccagctgctcttccagcagaaacggggccacctgcagcggcggtttacgcaggcccgccggtagggtgagcgagtgaaacgcgcagtcgctggccgggatcagcacccaggccgggtactgctcagccagcgccgggaaagggctggcgtcgtcagtcggccaccggccgctggcctcgtggtgcggctcgccgggggcgaagagttgccagtgcagcggcgcctgcgcagcggcgaggcgcacgatcagcatggcctggggagaagcattaatcttgttcatcgaccaccatagagagtccatatcgccgctggacgacggtaaacgtgcgccccgattgttgcaggacgctgtgcagctgaaagcggagattgccagtcaccacggtaaaagcggcgataaagcgtgcgctgtgcaccgccagccagggacgggcaagcgtggtatcggttttctgcagcgtcggctgcgcgagaaaggcggcgacgctgctccacccggttcgcgggcggttgtgcagcagctgttgcgcctcctgcagcgtcagatcgccgggaaagagggccaccagcagggcggcctgggaggggcgcagggtgttgacattgacctgcagcgcgtcatccggctggacgcagacgaaggggagcaggcgctgatagagcgcggcgtccatcccggccagcaggcgcaactcgctgacatcctgcatcggctggttggcggcgagatagcccggggtttgcgccatatagacctcgtcctccgccccgttcagccgcggctggccgtcgctgtccgtccagtcgccaagggcggcggcgatctggctggcgcgcagcggcggctcgccgagcagcgccagcagccgaacgaagacgtcggtcgggtagggcgttccgtcgccagcctcatccgcgcgatggtcaatagcattgaggttgaagcaggcgtgcccgtcgcggatcgtggcgcggatttcgccatcgtcgagggtaaaacggcgcccctcctgcgcccaggtttgcgccagattcgtttgactgggcgagtccagcgcatcgcgttgcagcagcgcggcggccatgttttccgccgccagggcgtaccatctggcctgcaaattatcgagggtcacggcggtatgctgatacatgaccgcggtgcgctcggtcatggcgctggcgaggatcatcatcagggcaaggatgaacagcaccatcaggagcgcgacgccgcgttgccgatttatcactggccgcctcccggggtgagtaaaaacaggcgggttatttccccgctgttcgccagcgtcagggtgatctccagcccctgcggcagcctctgcgggcggtcccaggtttcctgccagcgcccgtcggcgtaaaaccgcaggcgaaacgcggttacctcgcgcagcagcacccggaccgtcggctggctgccggtcagcggatcctgctgatcgaagctcagacgctcaagccgctgctggcgcagacggtagctgacgttctggatctccgagcgcgggaggatccccagcgggtttggccagccgctgcggctgaaggccagtccccagtcgtcgctctgcaactggaaacgtccggcgaagaaaaacgtgtcgctgtttctggcgcgacggggaatgatgtgggtgacatcgtcggctatctggcgaaaggcgcgctggagggccgcgatctgcaggcttttctcgcgggtcaggccatcggcgcggatgacgttctgcagcaccatcacggcggcggcgctgaggacggcgaggatagccagcgccagcagcgtttcgatcagagtgaaaccgcgcattttcgttatcatggcggcgtcacccaggtgcgcagggtggccagcggcgcgggatcgcttttttgccgccggacctccacgtccagcgcccgcagctgcggcagcgcggtttccactccctgccagcgaacgaaccagcgcgtcccggcggcctccacggtggtttcagaccagctgagggcaggccagcgtttctccagccgcagctgcaccagctggttatccgccagccagctggcgaggattttctcttccatacgcccgagctggcgcgtctgctgcagggtggactgcatcaccgccaggccagcgagggcgaaaatcaccagcgcgaccatcacttcgataagcgtcattccggcttcacgcttcatggctgctcccgcgccgccagcggctggctgtcgccctgggcgtcgacgttgatgcccgtcgcggcgtcaatccgcagctgaaacggcgtgacttcaccgccgggaaaaataagcacgtcgggctgctcgcccggcgtccacgcctggccgtcgggaaagcgcagcgtcagcctggcccgcgggagggtttccgccgtggtgacgcgtccggcctgcagcggcagccactgcgcgttgccccaccggtcgtcagccgccgccggggcgctatcgtcggcaggctgcaggcgcataaactgccagcgctcagggtggatgataatgccgaagagctgaccggtttgctgcccgcgctcgcggacaaaatccagttgcgcctgaaagcgcgccaggatctgtgtggcctcctgggtgcgggcggagggaaacgccagcagcaccatgctggcgctgacgccgatcagcagcaggaccagcatcatctccaggagggtgaaaccgcgctgagacactatttcttcccgagggtccagttgccgatatcgtcattggtgtcgggcatcccgtccgggccgacgctgaagacgtcgatggcgccatgctgacccgggcttaacagctgatactcattcccccacgggtcctgcggcagacggcggatatagccgccttccgggtagttgcgggcatgcggctcggcggccggagcggtcaccagcgcctgcagtccctgttcggtgttggggtagcggctattgtcgagtttatacatgtccagcgctccctcgagcgccaccagatcgctgacgactttctggcggtccgctttctccttgttgcccatcaggttaggcaccaccaggctggcgagaatgccgagaatgacgatcaccaccataatttccagtaacgtgaaaccgcgttgccgttgcatagttttctccattaatacagttacatactcataagggtgttcagttgcaggatcggctgcaggatggccagcacgataaacagcaccatgccggccatggtgaccaccagcagaggctcaaacaggctgagggccatctggatctgcgcgctcagctcccggtcctggttctccgccgcgcgctccagcatggcggtcagttctccgctctgttcgccgctggcgatcatgtagcgcatcatcggcggaaacagggcggtggattccagcgcccgatgcagactgacgccttcgcgtaccgattcgctggccgccgccagctggctgcgtgcccaggcgttgctgaggacgtcggcgctgatgcgcatcgacagcagcagcggcaccgcgctggcattgagaatgcttaaggtgcgggcgtagcgcgcgctgttgacgctgcgggccacgcggccgatgaccggcaggcgcagcagcgcccggtcccaggcgagccgccgggcgggctggcgcagcagatagcgcagcgccagcagcgccagtagcgacagcagcgccagccaggggcccgcgctgcgcacgatgtcgctcaggctcatcagcagccgggtggagaagggcagggcctgtttaaggtgaacaaactgctcaacgactttcgggactacggtggagagcagaatggcgatcacgctgatagcgaccagcgttagtacgatggggtagatcatcgcctgcagcaggcgggcgcggagctgctggcgctgctcggtatagtcagcaagccggttcagtacgccgtcgagatggccggaggtttcgccggccgccaccatggcgcagaacagcccgtcgaagcaggcgggatagccgcgcatcgcctccgccagcgagtggccttcgagcactttgctgcgcaccccggccattaacgttcttagcgacggcttttcgcactgctgggcgacggcatcgagcgccttttccagcgggatcccggcggcaaccagagtcgccagctggcgggtgagcagggctaaatcaccggcgctggtacgccgggtaagggatccgccggcccacagtcgccgcgccgggtcggcagttgtcacttccagcgccagccagcccttgtcccgcagcagctggcgggcgtggcgggcggagtcggcctgctgaaggccgcggcgggttttgccctgcgcgtccagcgcctgatagcgaaacagggccatcttagacgctttccgtcgtttgctgttcggtgacccgcatcacctcctcccagctggtgatccccgccagcgctttgtcgcgtccggcatgacgcagggtttgccaggctggccccagctgctggatcagggtgatctcattctcgccgcggtggatggcggcgcgcacgcgatcgtcgattagcagcagttcatggatcccggtgcgtccgcgatagccgatgaaattacactccggacagcctttgggctgccacaaccgcgcgccgaccgggaccgccatctgccgggcggtgttggcatccgcctgccagggctgacggcagtgtgggcacagttggcgcaccagccgctgcgacatcaccgccagcagcgaggtggagagtaaaaaaggttccacgcccatatcctgtagacgggaaatggcgcccagcgcgctgttggtgtgcagggtcgacagcaccaggtgcccggtcagcgaggcctgaacggcgatctgggcggtttcgccatcgcggatttcgcccaccagcactacgtccggatcctggcgcaggatggcacgcaggccgcgggcgaaggtcatctcgactttggcgttgacctgggtctggcctatgccctccagctcatactccaccggatcttcaatggtcatgatgttgcgctcccgggcgtcgaggcggctgagggcggcgtagagcgtcgtgcttttcccggagccggtcggaccggtgaccaggatgatgccgtgcgggcgggcgatcagcgcatcgacccgatcgagcagggcgggcggcatgcccagcgtcagcagatccaggttgacgctgtttttgtccagcagacgcaggacgacgcgttcgccgtggctggagggcagggtggagacgcgcacgtcgattgctcgcccgccgatgcgcagcgccatgcggccatcctgagggacccgcttttcggcaatgtccagactggccatcaccttgatgcgcgaaattaacagggcggccagccgccgctgcgggcgcagaatttcgcgcagcacgccgtcgacgcgaaagcggatctgcagatggcgctcgtaggtttcgatatgaatatccgaggctttctctttgatggcctcggtgagcatggcgttgatcaggcggatgatcggcgcgtcgtcctcgctgtcgagcagatcgtcggtgtccggcagctcttctgcgagggtatagaggtcgagctcgttgccgatgtcggccatcatgcggtgcgcctccgccgaatcacgctgatagctgagcaccagcactttctcgaacgcgtccggcgccagacggctgacgcgcatcgggccgtccgccaggcggcgcgcttccagcagcgcccgggcggcggtatcggggcggcacagcgcttcgcagcattcgccgtcgctgagcagcacaagatggtgcgcgcgggcccaggcgaagggcaacagcggacggcgttcggcggctggcgtcatgggcggcctccgagattgaaggcgtcaatggcggcgctgacctggcggaaggcctgggtctcctgctgcggatagatgtgcagcaggtcgttgctgagcgacgcttcgctgctttctttaccccgctgtttagtttgcgcattgttgaatgcggtgtactggccggaagaagcctggcggtactcatcgcgatcgcgaatgatggtcgggcggataaacagcatcaggttgcgtttcgacactttcttgctgtcggagcggaacagggcgccgatcaccgggatatccccgagcagcggcactttgtcagcggtatcggtgacggttttatccagcagcccgccaaccaccaccgtttcgccgctgccgaccagcacggcgttattcaccgtccgggtattgaaggtcgccccgagatcgctgctggtgctggaggccgagtcggcaacgctcgatacctcctgctcaatctccagcagcaccgcatcgccttcgttaatctgcggcttcaccttcagtttaatgccgacggttttgcgctcgacggtattgaagatgttgtcgccggaggtggtttgcgagccggttaataccggaacttcctggccgacgttaaaggtggcttgcatgttatcgagggtgacgatgctgggggtggccagaatatcgttcttggtactgctggagagggcggtgagcagcatcgcccagttcccctgatagaagccggcggcgataccattaaacgagccgagggcgctggccagcgagctgctgatggtaccgtctttgttgtactggttggcgccggcgatagccgtcgatatcggcaaaccgctgttggtgaactgcgtcatgccggcgttcttgtttgcccactggataccgagattaaggccatcggcatcctgcacttcggcaataatcgcctccaccagcacctgcgggcggcggatatcgagctgggcgatcacccgctcaagatcgttcatcacgtccggcgccgcggtgacgatcagggcgttggtctggccgtgggctttgataataatatttttgtcgatcgcggccactggcctggcgctttgcttgtcgctctgcagcgagctgctgatcccggtcagaacctccaccagatcggcggctttggcgtacttcaggtagatcactttggtgttaccctgtaccgcctgctggcggtcgagctgtttgatcatggcgatgatgcgctggcgcgagtttggttcgccgctcaccagtaccgcgttggtgcgctcatcggccaccacgttcgccaccatcgagcccggcagcgccgacttgctggtatctttattaagctcggtaaccagtttgaccacttccgcggcggaggcccaggagaggggcacggtcaccacgctgcgatccccggcgttgtcgacgcgctcgacaatggtcagcaggcgtttgataaccgccgcgcggccggtcatcagcagtacgttggagggctcataatggaccacgctgccggcgccagcgttatcgttcagctggcggagcagcggggcgagatcgcgggcggcgacgttggtcaggggcaccacccgggtgaccacttcatcgccttcgcccggtgcggccgcgctggcgaccggcacggccgaggtcttggcgtctttggcgcggaccacttttagcacgccgttattcatattgatcacggcgaagccatatacatccagcacgctgaggaagaattgataatattgttcttcattgagcatatcgtaactgcgcacggtgatagtgccgcgtacgctgggatcgataatcaccgttttattcaggtttttgctgacggtattgataaattcctggatatcggtgcctttaaaactggcggaaaattcctccgcggcggccggagaaaatagcagcggggttaatatcagcagcgcaggcagcatttttcgcaggcgtttcatggttggcaattattcatcccccagcgcgaaagcaatatcgtgtcgttggccttcccgctcaacggttagcgttatttcggtcatgtcggccagattctgcagcgcctgttgcgcttgctcctggtcgcgtaaatcgatgccatttaaggcaatcgccaaatcatttgcctgcaggccggactggcgaaacagcgaggcgtctttgcctgggtttagtcgataacccagcagtttgtcgccgctgagtaccggcgaaatagataaataagtgaggatattttgcggctgttcgcggagtcgcttcacgaggggcgggttgcccgcggcggtgggcggcggcgacggcgcgcggctgtcgttaaataataaaatggcctctttgcgcccctgatagttgacgatgatccggtcaggcagaatggcggcgatccgcgcatcataccctgggaggggatcgcccgtgctaaggctaacctgctgatttcccttttcgataatagcgatggagcgcgccgggttgctgctggcgagtagcccggccaggcgtagcttcaggctggaaaccggcacctgattgagactggcagcatccgttggcgtggggctatttttcaccgccaggccaaacagggtaaatgcgggccgcacattttttaattccggatctgccgccggaggcatggttaacggtagggcggaaatatcctcaggactcacagggaataccacgcgccaggttaatttcgccagctgtgggatagcggttattaatatgatgagcgtcacaatttgtggtaataatttaattatccctttatttatatttgttaacctcatcacagaaactggcattttaattcctttgctaatttatttttctgcacgttggcgtaataccctaccgaaacaggtaggtgattattggcttttgaattatttattgccggagagtggcgataagcgtggcgaatcataatcagtttgcggtttcgggtcgtcattccctttattgatttactcccccggcttcctacgccccccgctcatttgtgggggatgattgcgcctgggaaagcaaaaatatctaattagcgcgctgtaaagatattcatcctttcttaccttttataatttaataagcatattagggactatcgaatgctcagatatacctgtcatgccctatttcttggatcgttagtattattgagtggctgtgataacagctcttcctcttctacctctggctcaccgggttcaccaggcaatcctggcaacccaggcactcccggcacgcccgacccgcaggatgtcgtcgtccgcttaccggacgttgccgtcccaggcgaagcggtgcaggcttccgccaggcaggctgtcattcatctcgtcgatatcgccggcatcaccagcagcacgccggccgactatgcgacgaaaaacctctatttatggaacaacgaaacctgtgacgcgctgagcgcgccggtggcggactggaatgatgtcagcaccacgccgaccggcagcgacaaatatggcccttactgggtgatcccgctgactaaagagagcggatgcatcaacgttatcgtccgcgatggcaccaataagcttatcgacagcgacctgcgcgtctctttcagtgatttcaccgatcggacggtatcggtcatcgccggcaacagcgcggtctatgactcccgcgccgacgccttccgcgccgcctttggcgtggcgctggccgatgcgcactgggtcgataagactactctgctgtggccgggtggggaaaataaacccattgtgcgcctctattacagccacagcagtaaggtggccgccgacagtaacggcgaatttagcgataaatatgtcaagctgacccccaccaccgtcaaccagcaggtaagcatgcgcttcccgcatctcgccagctatccagcctttaaactgcccgatgatgttaacgtcgatgaattgctgcagggcgagacggtggcgatagccgcggaaagcgatgggatcctgagctcagccacccaggtgcagaccgccggcgtgctggacgatacctatgccgccgccgccgaggcgctgagctatggcgcccagctaaccgatagcggcgtgaccttccgcgtctgggcgcccacggcgcagcaggttgagctggtgatctatagcgcggacaagaaagtgatagccagtcacccgatgacccgcgacagcgcctccggcgcctggtcctggcaggggggaagcgacctgaagggcgccttctaccgctacgcgatgacggtctaccacccgcagtcgcgtaaagtcgagcagtacgaagtgaccgatccctacgcccacagtttgtcgaccaactcggagtacagccaggtggtcgatctcaacgacagcgcgctgaagccggaaggctgggacgggctgacgatgccgcacgcgcagaaaaccaaagccgatctggcgaaaatgacgattcacgaatcgcatattcgcgatctctccgcctgggatcaaaccgttcctgcggagctgcgcggtaagtatctggcgctcaccgcccaggaaagcaatatggtccagcatctgaaacagctgtcggcctcgggcgtgacccatattgagctgctgccggtcttcgatctggcgacggtcaatgagttcagcgacaaggtcgccgatattcagcagccgttcagccgcctgtgcgaggtcaatagcgcggtgaagagcagcgagtttgcgggctattgcgacagcggttcgacggttgaagaggtgctgactcagctgaagcagaacgacagcaaggataacccgcaggtgcaggcgttgaatacgctggtggcgcagaccgactcctataactggggctacgatccgttccactacacggtaccggaaggatcctacgccaccgatccggaaggcacagcgcgtattaaagagttccgcaccatgattcaggcgatcaagcaggatctgggaatgaacgtcattatggacgtggtgtacaaccacaccaacgccgccggcccgaccgatcgcacctcggtactggataagatcgtcccctggtactaccagcgtctgaacgaaaccaccggcagcgtggaatcggctacctgttgctccgactcggcgccagagcaccggatgttcgccaagcttatcgccgattcactggcggtatggaccaccgattataagatcgatggcttccgcttcgacctgatgggctaccacccgaaagcgcagatcctctcggcctgggaacgcattaaagcgctgaacccggatatctacttctttggcgaaggctgggattccaaccagagcgatcgctttgaaattgcctcgcaaatcaatctcaaaggcaccgggatcggcacgttctccgatcgtctgcgcgacgccgtgcgcggcggcgggccgttcgactccggtgacgcattacgccagaaccagggcgtgggcagcggggctggcgttctgccgaatgagctgaccaccctgagcgacgatcaggcgcgtcacctcgccgatctgacccgtctcggcatggccggtaaccttgcggactttgtgctgatcgacaaagacggcgcggtgaagagaggcagcgagattgattataacggcgcgccaggcggctatgcggctgatccgacggaagtcgtgaactatgtgtcaaaacacgataaccagacgctgtgggacatgatcagctataaagccgctcaggaggcggatctcgatacccgcgtccggatgcaggcggtgtcgctggcgacggtgatgctcggccaggggatcgcctttgaccagcagggctcggagctgctgcgctctaaatcctttacccgcgattcgtatgattccggcgactggtttaaccgcgtggactactccctgcaggacaacaactacaacgtcggtatgccgcgcagcagcgatgatggcagcaattatgacattatcgcccgggtgaaagacgcggtggctactccgggtgaaacggagctcaagcagatgaccgcgttttatcaggagctgaccgcgctgcgtaaatcgtctccgctgtttaccctcggcgacggcgcgacggtgatgaagcgcgtggacttccgcaatactggcgccgatcagcagacgggtctgctggtgatgaccatcgatgacgggatgcaggctggcgccagtctggacagccgtgtcgacggcatcgtggtggcgatcaacgccgcgccggaaagccggacgctgcaggacttcgccggcacatcgctccagctgagcgctattcagcaggcggcgggcgaccggtcgctggcgagcggcgtgcaggttgccgctgacggttcggtcacgctgccggcctggtcggttgccgttctcgagttgccgcagggcgagtcgcagggcgctggcctgccggtgagcagtaaataacataacgtagggcgcccgtaagggcgcctctggctgatgacaaacctgtttcgttattgtgctcgcctttctgtcgggtggcggctttcgccttacccggcctacgaaagattgcaatttcaaacagttatgcagttatctgtaggcccgcgcaagcgtagcgccgccgggcacttcctgaagattgcactttgtcagcagtctggggcatccgtaagggcgccttctcgttatcgtgagggaacaggagacggttgtgattgttcgtgatgacagtgaaagagggatcccgccgctggtgacgcatcagccgccgtcctcgatggatgatgcgccggtgatccgcggacggatggtgcagatccccggctggattatcccgctgtacgccggattatttatcgcgctcggctggtttggcggcgagcagtggcgtcacccggcaccgccgcaaacgctgcccttgccggtggcgcatgcggcgcttctgccgttaaccgctgccggagaggccgcgccaaagacgccgccgccggcggcaaaagccagcgcgcccgcggcgccggaagtgaacagcgatacgctgccgcctctgcgctacagcgcccatgtctacgcctcgcgaccggaaaagcgcagcattgtattaaacggcaaagcgtggacggagggcgattcacccctgccgaacctggtggtggagcagatccagcaggatgtgacgatcttcagcttcaacggcacgacctttaccctcgcggcgctggaggactggccgggcggaaaaattgacgaggagccgaaagaggaataaaagcgcacacaataaccggcgcgctgaggatatttcgcttagtcgctgcgcaagctggcaataaatggcgcgagctgacgattaaattgactgcactgtgtggcttccggggtactgtcctgtaatagctgttggtaaagccggtcgctatttgggcttaacgtcgccacgtcaatatttccccatccgcgcgctttaccgacattcaccgctgcccgatatatcgtttcatcagcggggagatcgctacgattacatttattcttgagatagcgcgtcccggccgccacggacgagagctgctcgagctgcgcctggctgctgatagccgggctgagcgttgaggcgggtttttgttggcagccagagagaagggctaccatgcaaagcggaaatataagcggaatacgcatcatagagtaatcaaaataatgaatcactggccgctagtttaacaaatatttacctggtgtcatcataaaatattattctgcataaatgttaacaggctctcatttttatcagcggaaaggcgcttaatcgactttacttttatcaataataaacgttggcgctgggaaaatatattttcatccgcggatgatgccactgcgttgaccggcaggaagcgcgccgttttttatgttattaaaaaacatactctttcccatcttgttacgtgcgcaggaggtaaaatgctggttaagaatgtcgcattttagtgctatcctgtatgccctgaacattacgtgctatgttctgacttattctgccgatgatgcgtttaacacaatgattttatggtgaatttttattgttagtatcatgtaacatgaagcaaaccaaccctctgaaaggctggcggcgcgtcctgcctgccagcaggttgtcgtccgaaggataagcagcctggacgttaatttgagagatttcttcttcctctgaacaggggaagtattgagaatcaggcctttgcgcctgaacgttgcggagaaaaagcatggcgggagatgaccgcgagcctatcggacgtaagggaagaccctcacgtccgactaaacagaaagtcacccgtcgccgggtccgggaagaggactacgacgacgagtatgatgacgatgattatgaggatgagaaaccggtgccgagaaaagccaaaggcaaaggtggcaagcctcgtcggaagcgcagctggctgtggctgctggtcaagctggggattgtcttcgcggtgctgattgccgcctatggcgtctacctcgaccagaaaatccgcagccgcattgacggtaaagtctgggagctgccggccgcggtctatggccggatggtcaaccttgagccggacatgcagatcagcaaaaacgagatggtgcgtctgctcaacgccacgcagtatcgccaggtcagcgcgatgacgcgccccggcgaatataccgtgcaggctaacagcatcgagatgatccgtcgtccgttcgatttcccggacagtaaggaagggcaggtgcgcgcgcgtcttaccttcgacggcgaccatcttgagaccatcgagaatatggataataaccgccagttcggtttcttccgcctcgatccgcgtcttatcaccatgctgcagtcgccgaacggcgagcagcgcctgttcgtgaagcgcagcggcttccccgatctgctggtggataccctgctggcgaccgaagaccgccacttctatgagcacgatgggatcagtctctactccatcggccgcgcggtgctggcgaacctgacggcaggccgaacggtgcagggggcgagtaccctgacccaacagctggtgaaaaacctgttcctctccagcgaacgctcctactggcgtaaagccaacgaagcgtatatggcgctgatcgtcgacgcccgctacagcaaggatcgcatccttgagctgtatatgaacgaggtgtacctcggccagagcggcgataacgaaattcgcggcttcccgctggccagcctgtattacttcggccgtccggtggaagagctgagcctcgaccagcaggcgctgctggtggggatggtgaaaggggcgtcggtctataacccgtggcgtaacccgaaactggcccttgaacgacgcaatctggtgctgcgtctgctgcagcagcagcaggttatcgaccaggagctgtacgacatgctcagcgcccgtccgctgggcgtgcagccgcgcggcggggtgatttcaccgcagccggcgtttatgcagatggttcgtcaggaactgcaggcgaagctgggcgataaagtgaaagatctctccggcgtgaagatcttcaccactttcgactcggtggcgcaggatgcggcggaaaaagcggcctccgaagggatcccggttctgaagaaacagcgtaagctggcagacctggaaaccgccatggtggtggttgaccgcttcaccggcgaagtgcgggcgatggtcggcggcgcggagccgcagttcgccggttataaccgcgcgatgcaggcccgccgatcgattggttctctggccaagcctgcgacctatctgaccgcgctgagccagccgaatcagtatcgcctgaatacctggatcgccgatgcgccggtgacgattcgcctgtccaacggtcagacgtggtccccgcagaacgacgatcgtcgtttcagcggtcaggtgatgctggtcgatgccctgactcgctcgatgaacgtcccgacggttaacctcgggatggcgctgggcttgccggcggtagtcgatacctggactaaactgggggcgccgaagaatcagctcaacgcggtgccgtcgatgctgcttggcgcgctgaacctgacgccgattgaagtggcccaggccttccagaccatcgccagcggtgggaaccgtgcgccgctttccgcgctgcggtcagtgattgccgaagatggcactgtgctctaccagagctatccgcaggcggagcgcgcggtgcctgcccaggcggcctacatgacgctgtggactatgcagcaggtggtgcagcgcggtacggggcgtcagctgggggcgaagtatccgggcctgcatctggcggggaaaaccgggaccaccaacaataacgtcgatacctggttcgccggcatcgacggtagtcaggtgaccatcacctgggtgggtcgcgacaataaccagccgaccaaactgtacggcgccagcggagcgatgtcgatttaccagcgctatctggcgaaccagacgccaacgccgctggtgctgacggtgccggaagacgtggttgatatgggcgtggacagcaacggcaacttcgtctgcagcggcggtatgcgttctctgccggtctggaccacgcagccggatgcgctgtgccgtcagggcgaaatgatgcaacagcagcagttgcagcaacaggaagcgaaaaatccgtttaatcagtccgggcagcagccgccgccgcagcagcaacagcagcaacagccgccgaagcagcaggaaaagagcgacggcgtcgcgggctggatcaaggatatgttcggcagtaactgattttgaccgcacgaccagaccccttaatacgaaagtattaaggggtttttttatgcctgtaaaaaagttaacggctctttaactccataataactatctggttattaattcagccttcgaccggcggcgacaggcatatcgcttgccttgccttcgacgtttcgcctattatatcgcccgtcataataataattctcgtttacgttatcattcactttcatcagagatatacccatggcgcgtccaaaaactgctcagccaaatcactcgctgcgtaaagtcgcagctgtagtagccacggcggttagcggcatgtctgtctacgcacaggcagcagaacaaccgaagcaagaagaaaccatcaccgtcgttgccaccccggtcgcccaggaaagcgcctggggaccggcgccgactatcgcggcaaaacgctccgccacggcgaccaaaaccgataccccgattgaaaaaacgccgcagtctgtgtcggtggtgacgcgccaggagatggagatgcgccagccgacgacggtaaaagaggcgctctcctatacgcccagcgtcttctccactcgcggcagttcgaccacctatgacgtggtcaccattcgcggcttcaccacctcgacgaccgtcaacaccaaccagtatctggacggcatgaagctgcaggggaataactactctgaagtctccatggatccttacttcctcgagcgtgtggaagtgatgcgcgggccaacctcggtgctgtacggcaacagcaacccgggcggtatcgtcagcatggtcagcaagcgcccgactaccgagccgctgaaagaagtgcagtttaagatgggcaccgacaatctgtggcagaccgggtttgactttagcgacgccattgatgatgctggcgtttggtcgtatcgcctgaccggccttggccgcagtcaggatgcccagcagcagatggcgaaatcgactcgctacgcggtggcgccctcctttagctggcgtccggacgataaaaccgacttcaccttcctgagcaacttccagaatgacccggatgcgggctactacggctggctgccgcgcgaaggcaccgtggtgccgtattacgacgccaacggtaaggcgcacaagctgccgaccgatttcaacgaaggcgagtccgataataaaatctcccgccgccagaagatggtgggctacagcttctcccatcagttcgatgacacctttaccgtgcggcagaacctgcgctatgccgatgtgcatacgctctatcgttcggtatacggcaacggctatgtcgcgccgggctacatgaatcgcgcctacgtgcgctccgacgagcacctgaacaccttcaccgtcgatacccagctgcagtctgatttcgccaccggcgcggtcagccatacgctgctgaccggcgtggactactcgcggatgcgtaacgatgtggatgccgactacgggacggcggatcctatcagcatgagcaatccgcagtacggcaatccgaatattcaggtcaccttcccgtacgcggtcctcaaccggatggagcagaccggcctgtacgcgcaggatcagatggagtgggataaatgggtgatgaccctgggcggccgttacgattacgccacgacctcaacgttaacccgcgccaccaacagcctggcggaggatcacgaccagcagttcagctggcgcggcggcatcaactacctgttcgataacggcatctcgccgtacttcagctacagcgaatcgtttgaaccggtatcgggttccaacagccgcggccagccgttcgatccgtcgcgcggtaagcagtatgaagccggcgtgaaatacgtgccgaaagatatgccggtggtggtcaccgcggcggtctatcagctgaccaaagacaagaacctgacggctgatccggctaaccaggcgttcagcatccagaccggcgagatccgctcccgcggccttgagctggaggcgaaggcggcggtgaacgccaatattaacgtcaccgcggcctacagctacaccgatgcggagtacactcacgatacggtgttcaacggcaaacgtccggcggaagtgccgcgtaacatggcctccctgtgggcggattataccttccacgaaaccgcgctgagcggtctgacgattggggccggggcgcgctatatcggttcaacggtcagctactacaaaaatgacaccagcaccggtaagaaaaatgatgcctttagtgtggccggttatgcgctgatggatgcgacggtgaaatacgatctggcgcgctttggcctgccgggatcgtcggtcggcgtcaacgtcaacaacctgttcgaccgcgaatatgtctccagttgctacagcgaatacgcctgctactggggcgccggacgtcaggtcgtcgccaccgccaccttccgtttctaaccacctacgggcgcggttcgccgcgccctctatcaggttatcgctatgcaggaacagactccgcacgcagaaaccaccttcgcgctggatcgcgtcactttccgtgtgcctggtcgcacattgctccatccgctctcgctcaccttcccgtccggaaaagtcacaggcctgatcggccataatggctccggcaaatcgacgttactgaaaatgcttggccgtcatcagccgccctccgcaggcgaagtgctgctggacgggcagccgctggagagctggggcagcaaagcctttgcccgcaaagtggcctatctgccgcagcagctgccgccggccgaaggtatgacggtgcgcgagctggtggcgatcggccgctatccatggcacggcgcgctgggtcgctttggcgcagcggaccgtgagaaagtagaagaggcgattgcgctggtggggctgaagccgctcgctcatcgtctggtggacagcctctccggcggtgaacgccagcgggcgtggatcgccatgctggtggcgcaggacagtcgctgcctgctgctcgatgaacccacctcggcgctggatattgctcatcaagtcgatgttctggcgctggtgcatcgtctcagccagcagcgcggcctgacggtgatcgccgtcctgcacgatattaatatggcggcccgctattgcgactatctggtggccctgcgcggtggagaaatgattgcccaggggacgccggcggaactgatgcgcagcgacactctggaacagatctacggcatcccgatggggatcctgccacacccggccggtgcggcgccggtaagctttgtctattgatgatgaacccaactctgataacccgacgccgcctgctgatcgcgatggcgctctcgccgctgctgtggcagatgcgcggcgcgcaggcggccgacgtcgacccgcagcgcgtggtcgccctggagtggctgcccgcggagctgctgctggcgctcggcgtgacgccctatggcgtggccgatattcccaactatcgcttgtgggtgaacgaacccgcgctgcccgactcggtgatcgatgttggtctgcgtaccgaacccaaccttgaactgctgacgcagatgaaaccgtcgtttatcgtctggtcggcgggctacggcccgtcgccggagaagctggcgcgtatcgcgcccggccgcggtttcaccttcagcgacggcaaacggccgctggcgatggcccagcgttcgctactggaaatggccgatctgctgggcaaaacgcagcaggcgaagcgccatctggcggagttcgacgcgctgatggagagcctgcgtccgcgttttgccgggcgcggcgatcgtccgctgctgatgatctctctgctcgatccccgccacgtgctggtgtttggcgaaaactgcctgttccaggaggtgcttgatcgctttggtattaaaaacgcctggcacggcgaagcggcattctggggaagcgttagcgttggcatcgacaggctggcggcatttaacgaagccgatgtcatctgtttcgaccatggcaatgagcgagatatggctcaactgctggcgacgccgctatggcaggcgatgcccttcgtgcgcgcgggccgcttccagcgcgttccggcggtttggttctacggcgcgacgctgtcagcgatgcattttgcccgcgtgctggctgatgccctggggagaccggcatgaatacgcgtctctcgccgttagctattatcctgctggccgggctgctgggcgtcgccttcgcgctgagcatcgtcaacctcaatgtcgccttgccctatgcgcagtggcggcaggcgctgtggcagccggatgtcgatgatattgcccaaatgctgtttcattacagtttgttaccgagactggctgttgcgctgctggtgggcgccgggctgggactggttggcgtcctgttccagcaggtgctgcgtaatccgctggcggaaccgaccacccttggcgtcgccaccggcgcgcagctggggataacggtcaccacgttatgggctattcccggcgtgctggcgtcgcaattcgccgcgctggccggggcctgtctggtgggcgcgctggtgtttggcgtctcgtggggcaagcgcctgtcgccggtaacgctgatcctggcggggctggtggtcagcctttactgtggcgcgcttaaccagctgatggtgattttccatcacgaccagctgcaaagcatgttcctgtggagcaccgggacgctgacgcagaccgactggagcgtggcgcagcgcctgtggccgcagctgcttggcggggcaatactcaccttgctgctgctgcggccgctgaccctgatggggctcgatgacggggtggcgcgtaacctcgggctggcgctgtccctggcgcgcctcggcgccctgacgctggcgattgtcatcagtgcgctgctggtgaacgcggtagggattatcggctttatcggcctgttcgcgccgctgctggcgaaaatgcttggcgcccgtcggctgctggcgcggctgctgctggcggcgctgatcggcgcgctgctcctgtggctttccgatcaggtgatcctctggctgagccgagtatggcgggaagtctccaccggctcggtcaccgccctgattggcgcgccgctgctgctgtggctgctgccgcggttgcgcagcatcagcgccccggtgatgaacggcggcgataatgtgcagcctgagcgctatcatgtgcaatggtttgttctcgcaggcgtcgcgttgctgctgctggcggtgagcgtggcgctggcctttggtcgcgatgcccacggctggctgtgggcccacggcgatctgctggagcaactgctgccctggcgctggccgcgggtgctgtcggcgctgttcgccggggtcatgctggcggtcgccggctgtattatccagcgcctgaccggcaacccgatggccagcccggaagtgctgggcatcagctccggcgcggcttttggcgtcgtgctgatgctgttcttcgtgcctggcgacgcctttggctggctgctgccggccggcagccttggcgcggcggccaccttgctgatcattatgctcgccgccgggcgcggcggcttctcgccgcatcggatgctgctggcggggatggcgctgagcaccgccttcactatgctgctgatgatgctgcaggccagcggcgatccgcgtatggcgcagatcctgacgtggatctcggggtcgacatatagcgcgacgccggagagggtggtgcgtagcggcgcggtaatgctggcgctgctggcgctggcgccgctctgtcgtcgctggttaaccatcctgccgctgggcggggaggcggcgcgagcggtgggcatggcgctgacgtcatcgcggattgttctgctgctgctggcggcctgcctgacggcggcggcgacgctgaccatcggcccgctgagctttgtcgggctgatggcgccgcatatcgcgcggatgatgggcttccggcgaaccctaccgcatatggtgatttcagggctgactggcgggctgctgctggtcttcgccgactggtgcggacggatgatgatgttcccgtatcagatcccggcggggctactgtcgacctttatcggcgcgccttactttatttatttgctgagaaagcagagtcgctaacggtcctggatggcttcaacatccccggtggcgctatcgcttaccggggctacagcgctgtgcgatttggtagcccggataaggcgcaatgcgccttatccgggaaaatccctgcgccaccaggcattcaagcaccttacagcttggcaaatacccgacgcgcggcgtcgatggtgttgtcgatatcttcttcgctgtgggccacggacataaagccggcctcaaacgctgacggcgcgaggtacacgccttcctccagcatcagatggaagaagcgcttgaagcgttcaacgtcgcacttcaccacgtcctgatagcaggtgacggtttcggcatcggtaaagaagatgccgaacatgccgccgacgttattgaccaccagcgggatcccggcgtcacgcgccgcatccagcaggccttgcgccagctggttagtcagttcagtcagggtttcatggacccccggctgcgccacttcgttcaggcaggcgaagccagccgccatggcgatcgggttgccggagagggtgcccgcctgatagaccggaccggtgggcgccagagcgtccatcacctcacggcggccgccgaaggcgcctaccggcatcccgccgccgatgattttccccagacaggtcagatccggctccacgccgtagtaagcctgagcgcctgccagcgccacgcggaagccggtcatcacttcgtcgataatcagcagggcgccaaattcgtcgcacagggcgcgcaggcccggcaggaattccggctgcggcggaatgcagttcatatttccggccaccggctcgacgatgatgcaggcgatctcctgcggatactgctcgaacgccgcgcgcaccgaggcgaggtcgttataagtgcaggtcagggtatgtttggcgaaatcggccgggacgcccggcgagttcggctggccgagggtcaacgcgccggaaccggctttcaccagcaggcagtcggcatggccgtggtagcagccttcgaacttaatgattttgtcgcgcccggtgaagccgcgcgccaggcgaatggcgctcatggtggcttcggtaccggagttcaccatccgcaccatatccatggtcggcaccagctcggtcaccagggccgccattttcacttccatttcggtcggcgcgccaaagctcaggccgcgggatgccgcctcgatcaccgcattgcggatagccgggtggttgtggcccagcaccatcggaccccaggaaccgacataatcgatataggctttcccatccacgtcatagaggtaagcgccatccgcgcgttcgataaacagcggtgtgccgccgacgccggtgaaagcgcgcaccggcgagttaacgccgccggggatcagttcgcgcgcagcgtgatacagattttcagatttgctcatggccagggtcctggttcgtgaaaaatgttttatcggctattctaagttattccaggatggttatgaaagttttgcccaattgaaacaatgtgccgcaatggcatttttttgacgacgcagcgcgccgggacggctaaaatgccgctctcttcatttgtattaccaataattgataacggcatgaaagcagaaactccctcttttgaagcacatcagtttgtgcgggtgcgtcgcggcgatgcggtgcgccgtctgattcaacgcgataaaacgccgctggcagtgctgtttatggcggcagtggtcggcacgctggcggggctggtgggcgtcgcctttgaaaagagcgtgaactgggtgcagaaccagcggatcggcgcgctggcgcaggtggcggaccactggtatctggtctggccgctggcgtttatcctgtcggcgctgctggcgatggtcggctattttctggtgcgtcgctttgcgccggaagccggcggctccgggattccggaaattgagggcgcgctggaggagctgcggccggtgcgctggtggcgcgtgctgccggtgaaattcgttggcggcatggggacccttggcgccgggatggtgctgggtcgtgaaggaccgatggtacagcttggcggcaacattgggcgcatggtgctggacgttttccgcatgcgcagtccggaagcgcggcatacgctgttggcgaccggtgcggcgtcggggctttcggcggcctttaatgcgccgctggccggtattctgtttatcatcgaagagatgcgcccgcagttccgctacaacctgatctccattaaagcggtgtttaccggcgtgatcatgtcgagcattgtgtttcgcattttcaacggcgaagcggcgatcattgaggtgggtaaactaagcaacgccccggtaaataccctatggctgtatctggtgctgggcatgctgtttggctgctttggcccgctgtttaattttctggtgctgcgcactcaggatctgttccagcgcatccacggcggcaacatcaaaaaatgggtgttgattggcggattaatcggcgggctctgcggtctgctggggctgatgcagccctccgcggtgggcggtggctttaacttgatccctatcgccgctgccggtaacttctccgtcggactgctgctgtttatctttattgcccgcgtggtgaccacgctgatctgcttctcttccggcgcgccagggggcattttcgcgcctatgttggcgctcggcacgctgctgggcacggcgttcggcatggcggctattccgctgtttccggcctaccatctcgatgccggcaccttcgcgattgccggtatgggggcgctgctcgccgcctcggtgcgtgcgccgctgaccgggatcgtgctggtgcttgagatgaccgataactatcagctcattttgccaatgattattacctgccttggcgcaacactactggcgcaattcctcggcggtaagcctttgtattcgaccattctgcagcgtactctggcgaagcaggaagccgagcaggcggcaaaagcgcagcaggctccccgggagaatacttgaacgatttaccagggtattagataatggctcaaaaggtccggttattctttaaccggccggaagtatcaatgggagcagaaaatgagtgatgacgtagcgttgccgctggagtttaccgaagccgcagccaataaagtaaaacacctgattgcggatgaagataatccgaacctgaaactgcgcgtgtatatcaccggcggcggttgcagcggtttccagtatggcttcacctttgacgatcaggtgaacgaaggggatatgaccattgagaaacagggcgtcggcctggtggttgacccgatgagcctgcagtatctggtcggcggctctgtcgactataccgaagggctggaaggttcgcgctttatcgtgaccaatccgaacgcgaaaagcacctgcggctgcggctcctcgttcagcgtttaaagcgagttctcccccagcgggagggagcaaaccctaaaaacggtaaccttaaggttaccgttttgcttttgttaccgaccgttatcgtccagggcaaacgtcggcagcttcagatgccagcgaatagccgccagacgaattaccagggtgaccaccatccccatcattgccgaattctccagcgggagatgaaaggtgtcgtgtgccgtggcgtggacaataccgccgacgatacaggcggtggcgtagatttcggtacgcagaatcataggaatttcccgcgccagcacgtcgcgaataatcccgccgccgacgccggtcaccacccccatgcacaccgcgaccagcgggccgctgccagcaagaaaagctttattgacgccaatgccgacaaacaccgccagaccgacggcatcaagaacgggcaggatccatttcggcagccggcgaggctggcggaccagcaggatggtcagcatgctggtgaccatcgccaccaccagatcggtgggatctttgacccagaataccgggccattcgccagcgccatgtcgcggatggtcccgccgcctaccgccgtcactacccctaacaccagcacgccgaatgggtccatacgcagttttccggctagcagtacgccggagatcgcgaagacagctgtgccaataatatccagccaatagacaagcatcgttgattcccactgaacatccggtgtgccggatgattattttacctggtcaagcgccgcacaaagttgtttggcggcgaggataatacgtgggccggcgcgttcaaaccagtcgctgtgtaacgcaatcaacgaaatggtgagctgatgttgccaaaagcgctgcgcttcggcaatgcggctggcatccccggtcaccacgatcgcctgcggctggcgggccagcacctgttcgcggctcacctgcggccagggaacgcggctggtggcgaagatattctcgccgccgcaaagccttagcacctgatcctgaatcgaaccggggccgctggtgaacagcggtgcggagccgaactgcaggaagacgcgtttcttcggcgcgttggcatagcgcgctttcaacgcatcgtattcctgctgcatcgcctgcgccgcctgctgcgctttttccggctgcgggctccactgcgccagctcacgcagggtagcgatgatctcttctatggtcgaggtctgtacccacaggacatgaatacccagagactgcagctggttaacctggcgttcggcattgcccccgcgccaggccagcaccacgtctggcttgagcgccacgatgcgttccaggttcattccctgccagctggcaacctgttcgatcgttttggcctgcgaaggataatcggaatagctgctgacgccgaccggcgtgatcccggcggcaaaggccaattcggtattggcgggggagagggtgatcacccgcggcgcggccagcagccacgccggggcgagtaacagcagcgcggcaagcgcgaaggatagcgacttagccacgtgccaggttctgtaccagattctccaccatcagggtggactgtctggcggcgaccgcaaggaactcctcaaagctgaggtgggactgctggtcggccacgtcggagatagcgcgaaccaccacgaagggaaccttaaagttatggcagacgtgggcgatggcggacgcttccatttccacggcgatcgcctgcgggaagttatggcggatcttcgccagaccgacagagccgttaatgaaggcatccccgctaacgatgaggccgcgaacggcgttgagatctaacgctttaatgcagctctctgcggcggccaccagtttttcatccgccttaaaacccgccgggcagccagggagctggccgtattcatagccgaaggcggtgacgtcggcgtcgtggtagcgcgcttcatcggagacgacgatatcgccgaccttcagcgtcgacgccaggccgccggcagaaccggtattaatgatcacgtcaggctggcagcgctccagcagcagggtcgcgcccatcgccgccgctacttttccgataccagacttcagcagagcgacgtcaacgccgtgaagttggccggtatagatttcgcttccgccaatggtgatggtctggcggttttcgattttgtcgcgcagaagggtaacttcctcttccatagcgccaataatgccaattttcatagatttactcgcgatgtgtcaggtttagttgcatagtctatcatgcgcttaaggggaagcgtattgctcgcgcgggagaggctatggcaaagattgattttcgcaacaagataaactggcgtcgacgcttccgttcgccgccgcgggtggagacggagcgcgacatcctgcggatctttgaaagcgatcggggacggatcgtcaactcgccggcaatccgccgcctgcagcaaaaaactcaggtcttcccgctcgagcgcaacgcggcggtgcgcactcgcctgacccactcgctggaggtgcagcaggtggggcgctatatcgccaaagaggtgctgagccggctgaaagagctgaggctgctggaagagtatggcctggaagagctgaccgggccattcgagagcgtggtggagatggcctgcctgatgcacgatatcggcaatcccccgtttggccattttggcgaagcggcgattaacgactggttccgtcagcgcctggcgcccggcgatgcgctcgggcagccgctgaccgacgatcgctgcgaagtgcaggccttacgactgcatgacggagagacatcgcttaatgcgctgcgccgtaaagtgcgccaggatctctgcagctttgagggcaacgcgcagggcattcgtctggtccatacgctaatgcgtatgaacctgacctgggcgcaggtgggatgtatcctgaaatatactcgtccggcgtggtggtctgaggagacgccggccagccacagttatttaatgaagaaacctggctattatttagccgaagaagagtatgtcgcgcgtttgcgtaaagaactggatctcgcgccttacaatcggtttccattaacctggattatggaggctgcggatgacatctcatattgcgtcgcggatctcgaggacgcggtggaaaaacgtatttttagcgcagaacagctctatcagcatctttacgaggcctggggcagtcatgaaaaaggctcgttattttcgcaggtagtagaaaatgcctgggagaaatcgcgagccaattatctgaagcagagcgcggaagatcagttttttatgtatttgcgggtgaatacgctgaataagctggtgccctacgcggcgcgccgatttattgacaacctgccggcaatcttcaccggggactttaatcatgcgttgctggaggacgacagcgattgcagtcagctactggaactctataaaaatgtggcgatgaaacaggtctttagccatccggatgttgagcagctggaattgcagggctaccgggtgatcagcggcctgttggatatctatcagccgctgctgaaattatcgctggaggatttcagcgaattagtagcgcaggagcgggtacgacgtttacccattgcctcccggctgtatcagaaactttcgacccgtcaccggctggcctatattgaagcggtaaataaactggcgcgtacggcgcccgaatttgcgctgatggaatactattatcgctgccgtctgattcaggactatatcagcgggatgacggatttgtatgcgtgggatgaatatcggcgactcatggcggtggaataggctggagttttgtaaagatggacaataaatttttactttttccagaaacttaattccggaacttagcgttataaaatgactctgatagtcacgtacacagcaactttcgttacctgatattgagattgaaactgatgaaaaaaaccacgttagcaatgagtgcactggctctgagtttaggtctggcgttgtccccgctctctgcgagcgcggcagaaacggcatcttcggccactaatgcacagcagatgccaagcctggccccaatgctggagaaggtgatgccgtcggtggtgagcattaacgttgaaggtagcaccaccgttaataccccacggatgccacgtaacttccagcagttctttggcgataattcgccgttctgccaggatggttctcctttccagagttcgccgttttgccagggcggcggacagggcggtcagcctgacggcggccagcagcagaaatttatggcgctgggctccggcgtcatcattgatgccgccaaagggtatgtggtgaccaacaaccacgtcgtggacaacgccaccacgattaaggttcagctgagcgatggccgtaagtttgatgccaaagtcgtcggcaaagatccgcgctctgatatcgcgctgattcagattcaggagccaaaaaacctgacggcgattaagcttgccgactccgatgcgctgcgcgtcggtgattacaccgtggctatcggcaacccgttcggtctgggcgaaaccgtgacctccgggattgtctccgcgctgggccgtagcggcctcaacgtggaaaactacgaaaactttatccagaccgatgcggcgattaaccgcgggaactccggcggcgcgctggtgaacctcaacggcgagctgatcggtatcaacaccgccattctggcgccggacggcggcaacatcggtatcggttttgctatcccgagcaacatggtgaaaaacctgaccgagcagatggtgaaatatggccaggtgaaacgcggtgagctcggcattatgggcaccgaactgaactctgagctggcgaaagcgatgaaagtcgatgcccagcgcggggccttcgtcagccaggtaatgccaggttcggcggccgcgaaagcgggcattaaagccggtgatgtcatcacctccctcaacgggaaagcgatcagcagcttcgccgcgctgcgtgcccaggtcggcaccatgcctatcggcagcaaagttgagcttggtctgctgcgcgacggcaaaccggtgaccgtgaccgtcgaactgcagcagagcaaccagacccaggttgactccagcaccatcttcaacgggattgaaggggcggaaatgagcaataagggtcaggataagggcgtggtggtcaataatgtgaaagccggtaccccggcggcacagattggcctcaagaaaggcgacgtcatcgtcggggcgaatcagcagccggtgaaaaacatcgccgatctgcggaaaatcttcgacgccaaaccgtccgtactggcgctgaacattcagcgcggcgacgcctctatctatctgctgttgcagtaaccgccagcgctcgcttcccagccccttccctcgccgagggcaggggcttttttcgttctgtgaccgcccccacaactccacatatctcaccccggcttagtgcaaatgcacaatgcagcgcgacgatgactcttttatgctggtgcccagcaaagggggggactacatggctggctggcatcttgataccaaaatggcgcaggatattgtggcgcggaccatgcgcatcatcgataccaatatcaacgtgatggatgcccgcgggcggatcatcggcagcggcgatcgggaaaggattggtgaattgcacgaaggcgcgctgctggtcctctcccaggggcgggtggtggatatcgacgacgcggtcgctcgccatctgcacggggttcgccaggggattaacctgccgctgcgcctggagggggagatcgtcggggtgatcggcctgaccggcgagccggagtcgctgcgaaaatatggcgagctggtgtgcatgacagcagagatgatgctggagcagtcgcggctgatgcatctcctggcccaggacagccgtctgcgcgaagagctggtgatgaacctgattcaggcggaagagcataccccggcgctgaacgaatgggctcagcgtttaggcatcgatctcaatcagccgcgcgtggtggcgatgattgaggtagacagcggtcagctcggcgtggacagcgcgatggcggaactgcaacagttacagaacgcgctgaccacccccgatcgcaataatctggtggccattgtctcgctcacggaaatggtggtgctgaaaccggcgctgaacagctttggccgctgggacgctgacgatcacgtccggcgcgtcgagcagcttatcgccaggatgaaagagaatggccagctgcgctttcgcgtggcgctgggcaacttcttcaccggcccaggaagtatcgcccgctcttaccgtaccgcacggacgacgatgatggttggcaagcagcggatgccggagagccgcagttatttctatcaggatctgatgctgccggtgctgcttgacagcctgcgcggcggctggcaggccaatgagctggcccgtccgctggcgcgtttgaaggccatggacaacaacgggctgctgcggcggacgctgcaggcgtggtttcgccataacgtgcagccgctggcgacgtcaaaggcgctgtttattcatcgcaatacgctggagtaccggttgaaccgtatctcggagctgaccggcctggatctcggtagctttgacgacaggctgctgctgtatatcgcgctgcagctggacgaacaacgctaagacgtggaggcaaaaaaaatgccgggtagcgacgcgccatacccggcctggacgatgcatgctgtctggagtggatagagaccaccagcccggccaggcaacgcgccgccgggatgctcttacttacgggtgagcttttccagatcggcttcgatttcgctgatcttattggtgaccacgctttccagatggcgtaaatcgtcgaggattttacgcttgagatcgatttcagtgcgatcgcgctggcagatctgatctaactcgtcgataacgtagcgcagattggggctgatctcctggacctctttgtagccctggccgacgccgtcggcgacgacggttttgcgctgacgcggatatttgaacttcacgctcttggcgaagaattcgcctttgtctttctgaaaatagattttcagaatgtcgttgttagcttcctgccgcaggctatagcgatcgatctcatcagggttggtaatgccaagacttttcagattatcgtacataacggtacctttgatagcatcataaccattgaataattaacgaaaaaatccattttcgccagcatcaaatataaaaaaagcgggatatctcccgctttttatttgctttagtcgatggtgcgcagcagttcgttaatgccgaccttgccgcgggttttggcatcgactttcttcactatcaccgcgcagtacaggctgtatttaccatctttcgacggcaggttgcctgagaccaccaccgagccagccggtacgcggccgtagaagacttcgccggtttcgcgatcgtagattttggtgctctgaccgaggtaaacgcccatggagatgacggagccttcttcgacaatcaccccttcaaccacttcagagcgcgcgccgatgaagcagttatcttcgatgatggtcgggttcgcctgcagcggctccagtacgccaccgatgccgacaccgccggacagatgcacgtttttaccgatctgcgcgcaggagccgacggtggcccaggtatcaaccatggtgccttcgtcaacgtaggcgccgatgttaacgtaggacggcatcagcacagtgttgcgggcgatgaacgcgccctggcgcacggcggccggcggcaccacgcggaaaccttctttctggaaacgcgcttcgtcgtagtcagcgaatttcatcggcactttatcgaagtagcggctttccgcaccatcgataacctggttatcgttaatacggaaagagagcagtaccgccttcttcagccactgatgcgtcacccactgaccgtcgatcttctcagcgacgcgcagcgcgccggaatcaagaagggcgataacctggttaaccgcttcgcgggtcacggtatccacattagccggcgtaatgtcggcgcgacgctcgaaagcggactcaataacgttctgtaactgctgcattgtttctttccattcactaaaaaaaatacgtcaccctttatcgtttggattgagggccgctgtcaaccgttgttgcacttcttgttgcagctcattattaagggcacgccggtcggcggtggcgattataaataaatcttctactcgctcaccaattgtcgtaattcgcgccccgtgaagcgatatcccgaggtcggcgaacacctgcccgacgcgggcgagcagcccgggctggtcgagcgctatcagctccagaaacgattttcggtcggtatgggtcggcaggaaattcacctcggtgtccacggaaaaatggcgtagctttgccgcctgacgacgcggggccggaggctgccagctgcgctgagtgatggtctgctccagcccctggcggatcgcctcgtggcgatcggcggaaagggggctgccgtcgggctcaaggacgataaaggtatccatcgccataccgtcgcgggtggtgaagatctgcgcgtcgtggacgctgaggttgcgacggtcaagttcgccacacaccgcggcgaacaggtaagggcgatccgggctccagataaaaatctccgtaccgccgcgggtagcctgcgagctcagcaggatcatcggtttattcagatcgtggctcagcaggttgcgggcgtgccaggcgagctgcgtcggcgtatgtcgcacgaaatagttggcgcggcagcggttccagatctgatgcagcgcctcttcattaatattgtccatccgcagcagggccagcgcctgcagctgatggtgacgcactcgttcgcgcatgtccggggtgctttgcatgccgcgacgcagctgcttctcggtggcgaaatagagttcgcgcagcaggctctgcttccagctgttccacaaggtttcgttggtggcgcagatatcggcgacggtcagacacaccagatagcgcagacgattttccgtttgcacctcctcggcgaactgcttaatcacctccggatcctgaatatcgcgccgctgggcggtgactgacatcagcaggtggtgacgcaccagccaggcgaccagctgcgtttcgcgcgagttcagcccgtgcagctcggcaaacttcagcacatcctgcgcgccgaggatcgagtggtcgccgccgcgccctttggcgatgtcgtggaacagggcagcaattaagatcagctccgggtgcgttaagcgcggccacagctccacgcacagcgggtggcggctgcgggtttcttctttggcaaagctttccagcttgagcatcacccggacggtgtgttcatcgacggtgtaggcgtgaaacaggtcgaactgcatctggccgacgatatgcgaccactgcggcatataggcccacagtacgctgtggcgatgcatcggcagcagcccgcgacttaccgccccctgatggcgcagcatactaagaaagagcgtgcgcgcctccgggatatagcacagcggctgggtgagatgacggcgggcgtggcgcagatggcgcaacgtcgttgagtagatgccggtgatggtgctgttgcgcaccatgatataaaacatgcgcagaatggcctgcggttcgcgaataaacagcgtgtcgtcacgcagatcgataagggtgccgcgcagctggaaatcatcatcgatcgggcgtggtttttcatcctcggtcagggcgaggatagcctcctcaaacagctgaagcagcatctgattcagctcgctcacccggcgggtaacgcggaagaagtccttcatcatatgttcaatcggctggttgccgtcgccttcatagcctagccggcgggccacgctgagctggcggtcgaaaagcagacggttgtcatagcgcgtgagttcgagatgcagcgcgaaacggatgcgccacagctgatgcagacactcattgagttcattgcgctcggcttcggtcagaaagccgaagccgaccatctcatccattgaggtggcgccgaaatggcggcgagccacccactgtagcgtatggatatcgcgcaagccgccggggctgcttttcacgtccggctcgaggttatagctggtgccatgatagcgctgatgacggacgttctgctcttcgaccttggcggcgaagaacttttccgatggccagaagccgtcgctaaaaatatgtttttgcagttcaaggaacagcgcgacgtcgccgatcagcaggcgcgattcgattaagttggtggcaacggtcagatccgagagaccttccagtaggcactcttcgagggtgcgtacgctgtggcccacctccagcttgacatcccacagcagggtgagcagttcgccgactttttgcgcctggtcgtccggcagttttttacgactgaggatcagcagatcgacgtctgagagcgggtgcagttcgccacggccatagccgccgacggcgaccagcgccaggtcgctgacggattcaaaaccgcaggcgatccataatcgctgcagcaactggtcgataaattcggtgcgcgccgcgatgagctgctccgcgacgatgccggagtcaaacgcctcgcccagccagtgctggaaggtatcgatgtgcgccttgattgcggcacagttcagatcgccctggggccaactcaccgggtgttccggcgggacgggcaggagaggggaggctgtgtcaggtaatgagttgctcatcgcgtcaccataagaaaaaactatctaataaaaaagccggcgggcgccggcttttcatcattcatcgtgcgagattatcgccgggatggtgtcatccttgcgtagcgtcagaatttcgcagccgttgtctgtcaccacaatagtatgctcgtactgcgcagacaagctccggtctttggttttcaccgtccagccgtctttcatgctgcggatctcttttttaccggcgttgaccatcggctcgatggtaaaggtcatgcctggtttgagtacgacgttggtctccggcgaatcgtagtgcagtacctgaggctcttcatggaagccgcggccgatgccgtggccacagtactcgcgcaccacggagaaaccttccgcttccacaaatttctggatcgccgcgccgatggtgcgcaggttgatgcctggcttcaccattctcagcgccaggtacaggctttcctgagtgatgcggcacaggcgctcgccgagaatcgtcggtttgccgacgataaacattttggaggtatcgccatggaaatcatctttaatgacggtcacgtcgatattgacgatatcgccatctttcagcagcttgccgtcatcagggataccgtgacagaccacttcattgaccgaaatgcagacggatttcggatagccgtgatagccgaggcaggcggaaatggccttctgctcgttaacgatatagtcgttacagatgcggtccagttcgccggtgctgacgcccggtttgacgtagggttcgatcatttccagcacttcggcggccaggcggccggcaacgcgcattttttcgatgtcttcagatgtcttaatagagatagccatggagtatgtccagcagtgtcgatattttcgacaataatagagtaagtcctgtcaatggtaacagtccgggcaggctggtgccaaactgagaatcattaacagcacgcgacgtcaacaagagttggtgtctggatggattttgtggtataaagcgcgccggacttccgttccatctcagatacacaaggatggacgtaagcgacatagctcactttgtgtaataacacacacgtatcggcacatattccggggtgcccttcggggtcggtaatatgggatacgtggaggcataaccccaatttaatctatagaggttttaaacatggcaactgtttccatgcgcgacatgctcaaggctggtgttcacttcggtcaccagacccgttactggaacccgaaaatgaagcctttcatcttcggcgcgcgtaacaaagttcacatcatcaaccttgagaaaaccgtaccgatgttcaacgaagctctggctgaactgaacaagatcgctgctcgtaaaggtaaaatccttttcgttggtactaagcgcgctgcaagcgaagcggtaaaagacgctgctctgagctgcgatcagttcttcgtgaaccatcgctggctgggcggtatgctgactaactggaaaaccgttcgtcagtccatcaaacgtctgaaagacctggaaactcagtcccaggacggtactttcgacaagctgaccaagaaagaagcgctgatgcgcactcgtgagctggacaagctggaaaacagcctgggcggtatcaaagatatgggcggcctgccggacgcactgttcgttatcgacgctgaccacgagcacatcgctatcaaagaagcgaacaacctgggcatcccggtatttgctatcgttgataccaactctgatccggacggcgtagacttcgttatcccgggtaacgacgatgcaatccgcgcagtaagcctgtacctgggcgctgttgctgctaccgttcgtgaaggtcgctctcaggacctggcttctcaggcggaagaaagcttcgtagaagctgaataataaggtttaagcccttattagtaccgtgtatgaataggggcccattatcggccccttttttcaatttacgctgtttggccgttggccgggcagtatccacatctcccgaggattttagaatggctgaaattaccgcttccctggtaaaagagctgcgcgaacgtactggcgcaggcatgatggattgcaaaaaagcgctgactgaagcgaatggcgacatcgagctggcaatcgaaaacatgcgtaaatccggcgcgatcaaagcggcgaagaaagcaggcaacgtggctgctgacggcgtgatcaaaaccaaaatcgaaggcaactacggttacattctggaagttaactgccagactgacttcgttgctaaagatggtggtttccaggcatttgccgacaaagtactggacgccgctgttgcaggtaaaatctccgacgttgaagttctgaaagcgcagttcgaagaagaacgtgttgcgctggttgctaaaatcggcgagaacatcaacatccgtcgtatcgctgttctggaaggcgacgttctgggcagctaccagcacggtgcgcgtatcggcgttctggttgccgctaaaggcgctgacgaagagctggttaagcagctggcaatgcacgttgctgcaagcaagccggaattcgttaagccggaagacgtgtctgctgaagtggtagagaaagagtaccaggttcagctggacatcgcgatgcagtccggtaagccgaaagaaatcgcagagaaaatggttgaaggccgcatgaagaaattcaccggcgaagtttctctgactggtcagcctttcgttatggagccgagcaaatctgttggccagctgctgaaagagcacaacgctgacgtgactggcttcatccgctttgaagtgggcgaaggcattgagaaagttgagactgactttgcagcagaagttgctgcgatgtccaagcagtcttaatttttaaaaaaaggagccgcctgagggcggcttctttttgcgcccattttgtaaattcagccaactgcttatagtggccgcgctgaaatgcgacatacaatgtcgccggaattatcacatctcattcgttgacagtctcaggaaagaaacatggctaccaatgcaaaacccgtctacaaacgtattctgctgaaattaagtggcgaagcgctgcagggctcagaaggcttcggtattgatgcaagcatacttgaccgcatggctcaggagatcaaagagctggttgagctgggtattcaggttggcgtagtaattggtggcggtaacctgttccgtggtgctggtctggcgaaagcgggtatgaaccgcgttgtgggcgaccacatgggcatgctggcaacggtcatgaacggcctcgcaatgcgtgatgcgctccaccgcgcctatgtgaacgctcgtctgatgtccgccatcccgctgaacggcgtatgcgacaactacagctgggcagaggcgatcagcctgctgcgcaacaaccgcgtagtgatcctctccgctggtaccggcaacccgttctttaccaccgattccgcagcctgcctgcgcggtatcgaaattgaagccgatgtggtgctgaaagccaccaaggttgacggcgtattcaccgctgacccggcaaaagatccttctgccaccatgtacgatcagctgacctacagcgaagttctggaaaaagagctgaaagtcatggatctggcggccttcaccctggcgcgtgaccataaattaccgattcgcgtcttcaacatgaacaaacctggcgccctgcgtcgcgtggtgatgggcgaaaaagaaggcacattgatcacggaataattcccgtcagcgccaaatccgggtaatattccgctttactttcgcggggatattgcccggtgattttcattaaatctgactatacttagctcattttccgacgggtgccccgtctggtctgactgagacaagctttcaaggattcgtaacgtgattagcgatatcagaaaagatgctgaaatccgcatggaaaaatgcgtcgaagcattcaaaaaccaaatcagcaaaattcgcacgggtcgtgcttctccgagcctgctggacgggattgttgttgaatactacggtactccgaccccgctgcgccagctggccagcgtcaccgtcgaagactcccgtaccctgaaaatcaacgtctttgaccgttctatgtccgcggccgttgaaaaagcgatcatggcctccgacctcggtctgaacccaagctctgccggcagcgatattcgtgttccgctgccgccgctgaccgaagagcgtcgtaaagatctgaccaagatcgtgcgtggtgaagccgagcaggcgcgcgttgccgtgcgtaacgttcgccgtgacgccaacgataaagtcaaagcgctgctgaaagaaaaagagatcagcgaagatgacgatcgccgttctcaggacgacgtgcagaaaatgactgacgccgccatcaaaaaagttgacgcggcgctggcagacaaagaagcggaactgatgcagttctaatgctctgcccttactcgggccagacaggctttggcctgagtaaaatctgaaacgccgtacagaagactgtacgctcaattctcgggattgcgttgcgaccgctggccttgtagcctttagcgcttagttgaaggcctaatgccgccgtctcatccccgatagttgctgcgtaggggcttgctggcggcgttttgctttttattctgtttccactcttctggacgtctcatgaagcaattaaccgttctcggttcgaccggctccattggctgtagcacgctggacgtggtgcgccataaccctggtcgcttttccgtcgccgcgctggtcgcggggaaaaacgttgaccgtatggttgaacaatgcctggaatttaccccccgttacgcggtgatggacgatgcgcaaagcgctgagcggttgcgcacccgtctgcatgagcatggcagtcgcaccgaggtgctgagcggccagcaggcggcggcagaggtcgcggcgctggatgaggtcgatcaggtcatggcggcaatcgtcggcgcggcgggactggtgccgacgctggcggcgatccgcgccgggaaaacggtattgttagcgaataaagaatcgctggtgacctgcggtcgcttattcatggaggcggtgcaacagtcgggggcgcgattgctaccggtcgatagcgagcataacgctatttttcagagtatgccggagacaattcagcagcatctgggatacgctgatcttgcccggaacggcgtctcgtctatcctgctgaccggctccggtgggcctttccgcgagacggccgtggctgaactggcggcgatgaccccggatcaggcctgccgtcatcccaactggtcgatggggcgcaagatatccgtcgattcggccacgatgatgaacaaaggcctggaatatattgaagcgcgctggctgtttaacgcctcggcccagcagatggaagtgctgatccatccgcagtcggtgatccactcgatggttcgctatcaggatggcagcgtgctggcccagcttggggagccggatatgcgcacgccgatcgcccataccatgggctggccgcagcgactgaattccggcgttaaaccgctggatttctgtcagttgagcaatctgagcttctccgcgccggactatacgcgatatccgtgcctgaagctggcgatggacgcgtttgacgtcggccaggccgcgaccacgacgctgaatgcggctaatgaagagtcggttgccgcgtttctgcatggcgatatccgctttaccgatattgcggcggttaacctggcggtgctggataagatggacctgcaggagccgcaaagcattgatgatgttctggttatcgacgccgaggcgcgctcaatcgctcaccagcagctgcagcggttggttgcgcaggcgtaacgcggtgatatttgtgggcgcaaggcttcggtgatatagtctgcgccacccgatcgttgcattttgttgttaaagattacggtggccgtgacaaaacacggcttttttgcgtaaagcttttggttgttctctgcgattggctgcagccccggcaccggataaaaatgcgtatccagcgcggcccggtggcctctgtttggtggctagttaatccttattatggacttaaaacgcgtgatgttgtctgctaatcaaactgtcagcgaaatatcgcccacccatggctgccgtcatgtcgccattattatggatggcaacggccgttgggcgaaacggcaaggtaaaattcgcgctttcgggcataaggccggtgcgaaatccgtgcgtcgcgcggtctccttcgcggcgaataatgggattgaggcgttaacgttatacgcgttcagcagcgaaaactggaaccgtccggctcaggaagtcagtgcgctgatggaactgttcgtctgggcgctggatagcgaagtcaaaagcctgcaccgacacaatgtgcgtctgcggattattggcgacaccacgcgcttcaatgcgcgcctgcaggagcggatccgcaaagcggaagcgctaaccgcaaacaataccggcttaacgctgaatattgcagccaattacggcggtcgctgggatattacccagggcgttcgtttgctggcgaaacaggtacaggacgggacgctgctgcctgagcagatcacggaagacatgctgagtcagcaggtctgcatgcatgaactggctcccgttgatttagttattaggaccgggggagagcaccgaataagtaactttctgatttggcaaattgcctatgccgaactttactttacggatgttctttggcccgattttgctgaacaggactttgaaggtgcactccatgcctttgttaatcgagagcgtcgtttcggcggcactgagccgggtggcagtcatgcctgatgggggtcacttttgctgaagtatcgcctgatatctgctttcgtcttaatccccatcgtcattgcggcattgtttttattgccgccgatgggctttgctatcgtcaccctggtggtctgtatgctcgccgcctgggagtggggacaactgagcggttttacctcgacgtcgcagcgggtttggctggcggtgctgtgcggccttctgctggcggcgatgctttttctgctgcctgaataccactatgacgttcatcaaccgatggttgaagggtcgctatgggcctcttttgcctggtggatcgtcgcgttactgctggtgctctcatacccggcgtcggcggcattctggcgccactcaaaggtgctgcgcctcatcttcggcatcctgaccatcgtcccgtttttctggggcatgctggcgctgcgcgcctggcactatgccgataaccactacagcggcgcactgtggctgctgtacgtcatgatcctggtgtggggcgcggactctggcgcctatatgtttggtaaaatgtttggcaagcacaagctggcgccgaaggtctcaccgggtaaaacctggcagggcttttttggcggtttgctgaccgcggcagtgatttcctgggcctacggcgtgtgggcccatcttgacgtcacgccgacggtgctgctggtctgttcggtggtggcggccctggcttcggtgctgggcgacctgacggaaagtatgtttaagcgcgaggccggcattaaggatagcgggcacttgattcccggacatggtggtattctcgatcgtatcgacagcctgacggcggcggtaccggtcttcgcctgtctgctactgttggtcttcaggacgatttgacggaaggttatatgctgagcgtgctctggaatctggcggcttttatcattgcgcttggcgtactgattacggtgcatgagtttggccatttttgggtggcgcgccgctgcggtatccgggttgagcgtttttctatcggcttcggcaaagcgctgtggcggcggatggataagcagggcacagagttcgtcatcgccctgatcccactgggcggctacgtcaagatgctggatgagcgtgttgaagcggtggcgccggagatgcgtcactacgccttcaacaataaaaccgtcggtcagcgtgcggcggtgattgccgccggccccatcgctaacttcattttcgctatctttgcttactggctggtctttatcatcggcgttcccggcgtgcggccggtggtgggtgaaataacgcccaattcggttgccgcgcaagcacaaattgcaaaaggaacggaacttaaagcgatagatggtatcgaaacgcctgattgggatgcggtgcgtctgcagctggtggccaaaatcggcaacccgcaaacaatagttaccgtcgcccctttcgggaccaatcagcgccaggataaaatcgtcgatctgcggcactggtcgtttgagccagacaagcaagatcccgtgacctcgctggggatccagccgcgcagcgcgcagattgatacggtgctggctgaggttcaggcgggatcggcagcccagaaagcgggtttgcaagcgggcgaccggatcgttaaagtcgatggtcaaccgttaacgcagtggatgacgtttgttaatctggtgcgcgataatccgggcaaagcgctggcgctggagattgaacggcaggggagtgcgctgccgttaaccctgacgccggatgcgaaaacggtgaaaggtaaggcggaagggttcgcaggggtggtgccaaaggtcatcccgctgcctgaagaatacaagacagtacgtcagtacggaccgtttgccgccatcgctgaagccacggataaaacctggcagctgatgtcgctgacggtcaggatgctgggtaaattgataaccggtgatgtcaaactgaacaacctcagtgggccgatctctatcgctcagggggctggaatgtcagcggagtttgggttgatttattatctgatgttcctggcgctgattagcgtgaacctcggaatcatcaacctgttccctctacccgtactggatgggggacatctgctgtttttagcgattgaaaagctgaagggcgggccggtatccgagcgagttcaagactttagttatcgcattggctcaatactgctggtgctgttaatggggcttgcacttttcaatgatttctctcggttataagagagtttgttaggaagaacgcataataacgatggcgatgaaaaagttgctcatagcgtcgctgctgtttagcagcgcgactgtatacggtgctgaagggttcgtggtgaaggacattcatttcgaaggcttgcagcgtgtcgctgttggtgcggccctcctcagtatgccagtgcgtcctggcgatacggtgaccgacgatgatatcagtaacactattcgcgcgctgtttgccactggcaacttcgaggacgtccgcgtcctgcgcgatggtgataccctgctggtgcaggtgaaagagcgtccgacgatcgccagcatcaccttctccggcaacaagtcggtgaaagatgacatgctcaagcagaaccttgaggcctcaggcgttcgggtgggcgagtcgcttgaccgcacgaccatcgcggatatcgagaagggtcttgaagacttctactacagcgtcggtaaatacagcgccagcgtcaaagcagtcgttacgccgctgccgcgtaaccgtgtcgatttgaagctggtcttccaggaaggcgtctccgcaaaaattcaacagatcaacatcgtcggcaaccatgcgttttcgaccgatgagctgatctcccacttccagctgcgcgatgaggtgccgtggtggaacgtggtcggcgaccgtaaataccagaagcagaagctagcgggcgaccttgaaaccctgcgcagctactacctggatcgcggctatgcccgtttcaacatcgattctacccaggtcagcctgacgccggataagaaagggatctacatcaccgtcaacatcaccgaaggcgatcagtacaagttttccggagtgcaggtgacgggcaacctcgctggccattccgcggaaatcgaagcgctgactaaagttgagccaggcgaactgtacaacggcgcgaaagtgaccaagatggaaaacgacatcaagaaactgttgggtcgttatggttacgcctatccgcgcgtgcagtcgcagccggagatcaacgacagcgataaaaccgttaagctgcacgttaacgtcgacgcaggcaaccgttattacgtgcgtaaaattcgcttcgaaggcaacgacacctctaaagatgccgtactgcgccgcgaaatgcgccagatggaaggcgcatggctggggagcgacctcgtcgatcagggtaaagaccgtctcaaccgtttaggtttctttgaaacggtggatactgatacccagcgcgtgccgggcagcccggaccaggtcgacgttgtctacaaggtgaaagagcgtaacaccggtagcttcaacttcggtatcggctacggcaccgagagcggcgtcagcttccaggcgggcgttcagcaggataactggttaggtactggctatgctgtcgggatcaacggtaccaaaaacgactaccagacctataccgagctgtcggtgaccaacccgtacttcaccgtagacggtgtaagcctcggcggtcgtgtcttctataatgactttgatgcgaacgatgcggatctgtctgactataccaacaaaagctatggtacagacattacgctgggcttcccggtcaatgaatacaacacgctgcgcgccggcgtcggttatgtgcataactccctgtccaatatgcagccgcaggtggcaatgtggcgttaccttaactcgatgggccagtatccggacaacaccaacgaccggaactcgttcagtgcgaatgacttcaccttcaactacggttggacctataacaagcttgaccgcggcttcttcccaacggaaggttcgcgcgtcaacctgaacggtaaggtgaccattccgggctcagacaacgagtactacaaagcgacgctggataccgcgacctacgtgccgatcgacaacgatcatcagtgggtagtactgggtcgtacgcgctttggttatggcgatggtatcggcggcaaagagatgccgttctatgagaacttctatgccggtggttccagcaccgtgcgtggcttccagtcgaacaccattggtccgaaggcggtgtacttcccggcaagcagtcgtcatgatgatgacgatagttacgataatgaatgtaagagcaccgaatccgcaccgtgtaaatccgatgatgcggtgggcggtaacgcgatggcggtggccagccttgagctgattaccccgacgccgtttattagtgacaaatatgcgaactcggtccgtacttccgtcttctgggatatgggtaccgtatgggatactcactgggattcgagcgcgtacgctggttatccggattacagcgatccgagcaacatccgtatgtctgcgggtattgccgtgcagtggatgtcgccgttggggccgttggtcttctcctacgcccaaccgttcaaaaagtacgatggagacaaagccgaacagttccagtttaacattggtaaaacttggtaattgttggcggcaacggaatgcaagtgcagtatagcgctgactgtaggcgataacgcgtttatcgcctcgccacgcaaataacggtacccctgggtactcatgggatggtaaggagtttattgtgaaaaagtggttattagctgcaggtctgggtttggcaatggtaacttccgctcaggcggcagataaaattgccctggtgaacatgaacagcctgttccaacaggttgcccagaaaactggcgtttccaacacgctggaaaacgagttcaaaggccgcgctagcgaactgcagcgtatggaaggcgacctgcagtccaaaatgcagcgtctgcagtccatgaagccgggcgccgaacgtaccaaactggaaaaagacgtgatggctcagcgccagaccttctcccagaaagcgcaggcgtttgaacaggatcgcgcacgtcgttccaacgaagagcgtggcaaactggttacccgtatccagactgccgtacagagcgtagcgaaagatcagagcatcgatctggtggttgacgcgaatgccgttgcatataacagcagcgatgtaaaagacatcaccgctgatgtgctgaaacaggttaaataagtaatgccttcaattcgactggctgatctcgcgcagcagttggatgcagaattacacggtgatggcgatatcgtcatcaccggcgttgcgtccatgcagagcgcgaaaacgggccaaatcactttcatggtcaaccctaagtaccgtgagcacctggccgcttgccaggcttctgccgttgtgatgacgcaggatgatttaccttttgcccatagcgccgcgctggtagtgcgtaacccctacctgacctacgcgcgcatggctcaaattcttgataccacgccgcagccggctcaggatatcgcgccgagcgcggtcatcgatccgtcggcgaagctgggtagcaacgttgccatcggcgccaacgcggttatcgaatccggcgtagtgctgggcgataacgtagttatcggcgcaggctgcttcgttgggaaaaatacgaaaataggcgccggctcgcgtttgtgggctaatgtgaccgtttaccatgagattgagatcggcgagaattgcctgattcagtccagcacggtgattggcgcggatggcttcggctacgctaacgatcgcggtaactgggtaaagatcccgcagctgggtcgcgtcattattggcgatcgcgtggagattggcgcctgcaccacgattgaccgtggtgcgctggacgataccgtgattggcaacggggttatcattgataaccagtgccagattgcgcataacgtggtgattggcgacaataccgcggtcgctggcggcgttatcatggcgggcagcctgaaaattggccgctactgcatgattggcggcgccagcgtgattaacggccatatggaaatctgcgataaggtcaccgtcacggggatggggatggtgatgcgtcctatcagcgaacctggcgtatattcctccggtattccgctgcagccgaacaaggcgtggcgtaaaaccgctgcgctggtgatgaatattgacgagatgagcaagcgcctgaaagcgattgagcgcaaggttaatcaacaagactaattcatcatttggtcacatgacattttcggcctgttgcattcgctaaaagattgccgcaggccgtgttattattgccttttagtacatttagacaggaagagtattttgactactgacactcatactctgcacattgaagagattctggaacttctgcctcaccgttacccgttcctgctggtagaccgcgtgctggattttgaagaaggtcgttttctgcgcgcagtaaaaaatgtttctgtaaacgagccgtttttccaggggcacttccctggtaagccgattttgccgggcgtcctgattctggaagcaatggcgcaagccaccgggattctggcgttcaaaagcgtcggaaaactggaaccaggcgagctttactacttcgcgggtatcgatgaagcacgcttcaaacgcccggtagtaccaggcgatcagatgattatggaagtcactttcgagaaaacccgccgcggcctgacccgtttcaaaggcgttgcgctggttgacggtaaagtggtttgcgaagcgacgatgatgtgtgcgcgtagccgggaggcctgatacgtgattgataaaaccgcttttgttcatcctaccgccattgtagaagaaggcgccgtgattggcgctaacgttcacattggtccgttttgtattgttggcgctaacgtcgaaatcggcgaaggcaccgtgctgaagtctcacgttgtcgttaacggccacaccaaaatcggccgtgacaatgagatctatcagttcgcttccatcggcgaagttaaccaggatctgaaatatgctggcgaaccgacccgggtggaaattggcgatcgcaaccgcattcgcgaaagcgtcaccattcatcgcggcacagtacagggcggtggattaacaaaggtgggcaacgataacctgctgatgatcaacgcccacgtggcgcacgattgtacgcttggcgatcgctgcattctggccaataacgcgacgctcgcgggccatgtttcgctggatgattatgtcattatcggcggcatgacggcggtgcatcagttctgcgtcattggctcacacgttatggttggcggctgctccggcgtggcgcaggacgttccgccgttcgtaattgcccagggcaaccatgcgacgccgttcggcgttaacatcgaagggctgaaacgccgcggcttcagccgggaagcaatcaccgcgatccgcaacgcgtataaactgctgtaccgcagcggcaaaacgctggaagaagccaagccggaaatcgccgaactggctgctcagcatcctgaggttcagccgtttgtcgatttcttcgctcgttctacccgcggcttgattcgttaatggctgaacagcgtcccctgacgattgccctggtcgccggagaaacctccggcgatattctaggcgctggtctcatccgcgcgcttaaagcacgcatcccgaatgcgcgctttgtcggcgtggcggggccgctaatgcaggcggaagggtgcgaagcctggtatgaaatggaagagctggcggtgatgggcattgttgaagtgctcggtcgcctgcgtcgcttactccatattcgcgccgatttgacccgccgcttcggcgagctgcgtcccgatgtcttcgtcggcatcgacgcccctgactttaatatcaccctcgaaggaaatctgaaaaagcagggcatcaaaaccattcactacgtcagcccgtcggtctgggcctggcgacaaaaacgcgttttcaaaatcggcagatccaccgatctggtgctggcctttctgcctttcgaaaaagcgttttatgacaaatttaacgtcccctgccgctttattggccataccatggcggatgcgatgccgctggatcctgacaaaggcgctgcgcgcgaccggttagggatcccgcacagcgtgcgctgcctcgctctgctacccggcagccgcggcgcggaagtcgaaatgcttagcgccgacttcctgaaaaccgcgcagcttctgcgcgccacctatcccgatctgcaggtggtggtgccgctggttaatgctaaacggcgggagcagtttgagcgtattaaagctgagacggcgccggatatgatcgtgcatatgctggacggtcaggcgcgcgatgcgatgatcgccagcgacgccgcgctgctggcctccgggacggcagcgctggagtgtatgctggcgaaatgcccgatggtggttggctaccggatgaagccgttcaccttctggctggcgaagcggttggtaaaaaccgactatgtctcgttaccgaacctgctggccggtcgcgaactggttaaagagctgctgcaggatgagtgcgagccccaggcgctggcagccgctctgcagccgctgctggccgatggcaaaaccagccatgagatgcatgagacgttccgcgccctgcatcagcagatccgctgcaacgccgatgagcaggcggcggacgccgtactggagttagcaaaacaatgatggagttcgtctatccgcatacccatctggttgccggcgtcgatgaggtcgggcgtggccccctggttggcgcggtggtgaccgcggcggtgatcctcgatccggcgaagccgattgtgggtctgaatgattccaaaaaactcagcgagaagcgtcgtctggcgctgttcgatgagattaaagataaagcgctgtgctggagcctggggcgcgccgagccgcacgaaatcgacgagctgaatattctgcatgccactatgctggcgatgcagcgcgccgtcgccggcctgagcattgttcctgagtttgtcctgatcgatggcaaccgctgtccgtcgctaccgatgccctcccaggcggtggtgaaaggcgacagccgggtggcagaaatcagcgcagcgtctattctggcaaaagtcactcgtgacgccgaaatggccacgctggacctcgcatttccccactacggatttgcccagcataaaggctatcccaccgctgttcacctgcagaagctgcaggaacacggcgcaacagagcatcaccggcgcagttttggcccggtgaagcgtgccctgggcctggcgtccaactaagtctccgggatctaaagatggctgaaccacgtttcgtacacctgcgggtgcacagcgactattccatgatcgatgggctggcaaagaccgggccgctggtgaagaaggcggcctcgcttggcatgccagcgctggcgatcaccgatttcaccaacctctgcggactggtgaagttctacgggacgggacacggcgcggggattaagccgatcgtcggcgccgactttcacgtgcagtgcgacctgctcggcgacgaatttaccgagctgaccgtgctggcggcgaacaacaccggctaccagaacctgaccctgttgatttcccgcgcctatcagcgcggctacggcgccctggggccgtggatcgatcgcgactggctggtggaacatcaggaagggctgattctgctctccggcggccggaaaggtgacgtcggcgtcagcctgatccgcggcaatatgccgctggttgaacagtgcgtcgccttctacgaagagcatttcccggaccgctattttctggagctgatccgtaccggtcgacaggatgaagaggcctatctccacgccgccgtggcgctggcggaagcgcgcggcctgccggtggtggcgaccaacgatgtccgctttctcgacaccagcgatttcgacgcccatgaaatccgcgtcgcgatccacgacggctttacgctcgacgacccgaaacggccgcgcaactactcgccgcagcaatatatgcgcagcgaggaagagatgtgcgagctgttcgctgatattccggaagcgctggcgaacagcgttgaaattgccaagcgctgcaacgtcaccgtgcggcttggcgaatatttcctgccgcagttcccgaccggcgatatgaccacggaagatttcctggtcatgaaatcgaaagagggtctggaagagcggctggaattcctcttcccggatcctgccgtccgtgctgaaaagcgcccggagtatgaccagcgtctggatattgaactccaggttatcaaccagatggggttcccgggctacttcctgattgtgatggagtttatccagtggtcgaaggataacggcgtgccggttggcccgggacgcggttccggcgccggttcgctggtggcctacgcgctgaagatcaccgatcttgacccgctggaattcgacctgctgttcgaacgtttccttaacccggagcgtgtctcgatgcccgacttcgacgtcgacttctgcatggagaaacgcgaccaggttattgagcacgtggcggatatgtacggccgcgacgcggtatcgcagatcatcaccttcggtaccatggcggcgaaagcggtcatccgcgatgtcggtcgcgtgctgggtcacccgtacggatttgtcgatcgtatctccaagctggtgccgcccgatccgggcatgacgctggcgaaagcctttgaggccgagccgcagctgccggagatctacgaggcggacgaggaagtgaaagcgctgatcgacatggcgcgtaagctggaaggggtgacgcgaaacgccggtaaacatgccggtggggtagttatcgctccaaccaaaatcaccgatttcgcgccactgtattgcgatgagcaggggctgcatccggttacccagtttgataagaacgacgtagaatacgccgggctggtgaaattcgacttcctcggtctgcgtacgctcactatcattaactgggcgctggagatgatcaacaagcgccgtgagaagaacggcgaagggccgctggatatcgccgccatcccgctggatgacaagaaaagcttcgacatgctgcagcgctcggaaaccaccgcggtcttccagcttgaatcgcgcggcatgaaagatctgattaaacgcctgcagccggactgcttcgaagatatgatcgcgctggtggctctgttccgcccgggcccgctgcagtcggggatggtagataactttatcgaccgtaagcatggccgcgaggagatctcttatccggacgtgcagtggcagcatgaaagcctgaaaccggtgctggagccaacctacggcatcatcctgtatcaggaacaggtcatgcagattgcccaggtgctgtccggatataccctcggcggcgcggacatgctgcgtcgtgcgatgggtaagaaaaagccggaggagatggccaagcagcgttctatctttgaggatggggcgaagaaaaacggcattgacggcgaactggcgatgaaaatcttcgacctggtggagaaattcgccggttacggatttaacaaatcgcactccgccgcctacgcgttggtctcctaccagacgctgtggcttaaggcgcactacccggccgagtttatggcggcagtgatgaccgccgatatggacaacaccgagaaggtggttggcctggtggatgagtgctggcgaatggggctaaaaatcctgcccccggatattaactccggcctgtaccatttccacgtcaacgacgatggcgagatcgtctacggcattggcgccatcaagggcgtcggcgaaggaccgatcgaagcgattattgaggcgcgcaacaatggcggctatttccgcgagctgttcgacctctgcgcgcgaaccgatattaaaaagctcaaccgtcgggtgctggaaaagctgattatgtccggggcgttcgatcgtctcggcccacatcgcgcggcgctgatgaattcgctgggcgatgcgttgaaagccgctgaccagcacgcgaaagccgaggccatcggccaggctgatatgttcggcgtgctggcggaagagcccgagcaaattgagcaatcctacgccagctgccagccatggcctgagcaggtggtgctggatggtgaaagggagaccctggggctatacctcaccggacacccgattaaccagtatctgaaggagattgagcgctacgtcggcggcgtgaggctcaaagacatgcatccgaccgaacgtgggaaagtcaccacggcggcggggctggtgattgcggcgcgggtaatggtcaccaagcgcggcaatcgtatcggcatctgtaccctggatgaccgttccgggcggctggaagtgatgttattcaccgacgcgctggataaatatcagcagttgctggaaaaagaccgcatacttatcgtcagcggacaggtcagctttgatgactttagcggggggcttaaaatgaccgcccgtgaagtcatggacattgacgaagcccgggaaaaatatgctcgcgggcttgctatctcgctgacggacaggcaaattgatgaccagcttttaaaccgactccgtcagtctctggaaccccaccgttcgggaaccattccagtgcacctctactatcagagggcggatgcacgcgcgcggttgcgtttcggcgcaacatggcgcgtctctccgagcgatcgtttacttaacgatctgcggggccttatcggctcggagcaggtggaactggagtttgactaatacaggaatactatgagtctgaatttcctagattttgaacagccgattgcagagctggaagcgaaaatcgattccctgactgcggtaagccgtcaggatgagaaactggatattaacatcgacgaagaagtgcatcgtctgcgtgagaaaagcgtagagctgacgcgcaaaatcttcgccgatctcggtgcatggcaggttgcgcaactggcgcgccacccgcgccgtccttacaccctggattatgtccgcctggcgttcgacgaatttgacgaactggccggtgaccgcgccttcgctgacgataaagcgattgtcggcggtatcgcgcgtcttgacggtcgtccggtgatgatcatcggccaccagaaaggtcgtgaaaccaaagagaaaattcgccgcaactttgggatgccggcgccggaaggctaccgcaaagcgctacgcctgatggagatggctgagcgttttaaaatgccgatcatcacctttatcgacaccccgggcgcctacccgggcgtcggcgcggaagagcgtggccagtcggaagcgatcgcccgcaacctgcgtgagatgtcgcgtctgagcgtgccggttatctgcaccgtaatcggtgaaggcggctccggcggcgcgctggcgatcggcgtgggcgacaaggtcaacatgctccagtacagcacctattcggtcatttcgccggaaggctgcgcctccattctgtggaagagcgcggataaagcgccgctggctgcggaagcgatgggcattatcgccccgcgtctgaaagagctgaagctgatcgattctatcgttccggaaccgctgggcggcgctcaccgcaacccggaagcgatggcggcaagcctgaaggcgcagctgctggcagacctggcagacctcgatctgctcagcgaagaagagctgctgaaccgccgttatcagcgtctgatgagctacggttacgcttaactttttcgtcaggactaaacactaagggccggattttccggccctttttttatgtgcgatgcgcccgggggattgctatgatgcttgacttaggtgaataccaggaggaaagcgtgaatatcatcgccatcatggggcctcacggcgtctaccacaaagacgagccgatcaaagaactggaagcggcgctgcagcgccagggcttccagaccatctggccgcaaaacagcgccgacctgctgcagtttatcgagcacaacccgcgcatctgcggggtgatcttcgactgggatgaatacagcgtcgatctgtgcagcgatatcaatcagctcaatgaataccttcctctgtacgccttcattaacgcccactcgacgatggatgtcagcagtcaggatttgcgcatgacgctgtggttcttcgaatatgcgctgggactctccgaagagatcgccacccgcattgggcagtacacccgcgagtacctggagaatatcactccgccgtttacccgcgcgctgttcaactatgtccaggagggaaaatataccttctgtacgccgggccatatgggcggcagcgcctatcagaaaagcccggtgggctgcctgttctatgatttttttggcgggaatacgctgaaggcggatgtctcgatttcggtcaccgagctgggctccctgctggatcataccggcccgcacctggaggcggaggagtatatcgcgcgcgcctttggcgccgagcaaagctatatggtgaccaacggcacctcgacgtccaataaaattgtcggcatgtactcggcgcccgccggcagcaccctgctgattgaccgtaactgtcacaaatcgctggcccacctgctgatgatgagcgatgtggttcccctgtggctgaagccgacccgcaacgcgctggggatcctcggcggtatcccccggcgcgaatttacccgcgacagcattcagcagaaagtgcgcgacacgggcggggcgcagtggcccgtgcatgcggtgatcaccaactccacctacgatggtctgctctataacaccacctggcttaaggagacgctcgatgtcccgtcgatccatttcgattccgcctgggtgccctatacccatttccatccgatatatcaggggaaaagcggtatgagcggggagcggatccccgggaaagtcatcttcgagacgcagtcgacgcataagatgctggccgcgctgtcgcaggcctcgctgatccacattaaaggcaactatgatgaagagacctttaacgaagcctttatgatgcatacctctacgtcgccgagctaccccatcgtcgcgtcgattgagaccgcggcggcgatgctgcgcggcaactccggtaaacgtctgatccagcgctccattgagcgggcgctggacttccgcaaagaggtgcagcgactgcgcgaggagtcggacggctggttctttgatatctggcagccggaagccgtggataaagccgagtgctggccggtagcgccgggcgaggactggcacggtttcaaagatgccgatgcggatcatatgtatctcgatccggtgaaggtcactattctgacgccgggcatggacgagcaggggaatatggatgaagaggggatcccggcggcgctggtggcgaagttcctcgacgagcggggcgtggtggtagagaaaacaggcccctacaatctgctgttcctgttcagtatcggcatcgataaaacccgggcgatggggctgctgcgcggcctgaccgagtttaaacgcgcctacgatctcaatctgcgggtgaaaaatatgctgccggatctgtacgccgaagatcccgacttctaccgcaacatgcggatccaggatctggcgcaggggatccaccgcttgatccgtcagcatcagctgccgcagctgatgctcagcgcctttgacgtcctgccggaaatgaaaatgacgccgcatcacgcctggcagcgccagatcaagggggaggtggaaactattgaactggagaacctggtggggcggatttcggccaacatgatcctcccttatccgccgggggttccgctgctgatgccgggagagatgatcaccgaggaaagccgggcggtgctcgattttctgctgatgctttgctctatcggccgtcattacccgggctttgagaccgatattcacggcgccaagcgcgatgaggacggtgtgtatcgggtacgagtcttaaaaaatgacgaaaggcttgcgcgttaacggcgcgcacgagtaacgtggctggcttaacagaaggagtttaaccatgctgggtttgaaacgggttcaccatattgccatcattgcgaccgactacgcccgcagtaaagcgttctattgcgatattctggggtttacgctgcaaagtgagttttatcgcgccgagcgcgattcctggaaaggcgatctggcgctcaacggcgagtatataattgagttgttctcgttcccgtttccgccagcccgccccagtcgtccggaagcctgcgggctgcgtcatctggcctttagcgtggatgatatcgacgccgcggtagcccatctcaccgcgcatggcgtggagtgcgaagcgattcgtgtcgatccctttaccggtaaacgctttaccttctttagcgatccggacgacctgccgctggaaatatatcagcagtaaatcttgccagcgcggccctggcccggtaacgtgccgggccatcacttctcggtatgttcgtggatatgacggctgatattgcgcatacgcttcatccccatcgccagctgctggtggccttcagcggcggtctggactcgacggttcttctgcatcagctggtgctgctgcgggaacaggatccctcgctgacgctgcgggcggtgcatgttcaccacggccttagcgcccacgcagacgactgggtggcgcattgtcggcagatttgccagcagtggcaggtgccgctggtggtgcatcgcgtgacgttagcccggggagggctgggcgtcgaggcccacgctcgtgcggcgcgctatcaggcctttcaggatacgctcaatgccggcgaggtgttagtgaccgcccagcaccaggacgatcagtgcgaaaccctgctgctggcgttaaaacgcggcagcggtcctaccggcctgtcggcgatggcgccatcctctgcctttgccggcagtcgactactgcgtcctctcctcaatgaaacccgcgaatcactacgccagtgggcgctcgcccatcagctgtcgtggatcgaagatgagagtaatcaggatgatacctatgaccgcaatttcctgcgcctgcgggtgatcccggtgctgcgcgagcgttggccgcactttagcgaggccgtcgcccgcagcgccagcctgtgcgccgagcaggaacaactgctggacgagatgttggcggcggagctggcgtcgctggtggccgaagatggctcgctggctatcgcgccgctggcgacgatgagtccgccgcgccgagcggcgctgctgcgtcgctggctcgccgggcagcaggcgccgatgcccgcccgcgaggtgcctgagcgcctctggcacgaggtggcgctggcgcgggaagatgccagcccctgtctgcggctgggggaatttaccgtccgccgttttcaacagcgtttgtactgggtgaagtatcttcccggtcagacggacagcgttcagcgctggcccgactggcgccagccgctgcggctggcggacggtctcggcgagctgacgctgcggcccggcggcaggctgcgcccgccgtcggcggatgagccggtcaccgtccgctttcgcgccagcggccacctgcatattgtcgggcgccatggcggacgcaagctcaagaagctctggcaggagctgggcgttgctccgtggcgacgagacaccacgccgctgctgttttacggcgaaacgccgattgccgcagcggacgatctgtttgtgaccacagaaggtgaagtgaaggacggggaaggggtcaggctgatgtggaggaaaacgggcgattaagcccgtttttgattcaggattcgctcaccaccacggtgccgatttccgggtgactgaagctggcgattttatccaggcgcagctcgcggacgttgccggcgagttcgaccaccagatactcgatattttttcgcgagataagatcgctggcctttgcctgcagctgttcgccatccttcagcgccagcgtcagcaccaggtgatgctggcaggccagctccaggttgtcgtaatcatcgcagttaatgggttgataagtatcattcattgacataatcgctcaccagtaagtttgctgccgcataagcggccttttccctgactgactccgaaagggcctcatccgccgcaatctcattcaatactttcaacacgcaacccagcgcatccgggatataccctaagtctccgctggctatttccgcataccgcttgcgtattaactcacaatagtggtccacatgccctcctgtcagcgttctgactcaaccgtgggatgcaagtttaagcctacgaagataaactctgtttagcaagggaactatatcatagtcatttaagcaatttcagcaggatgaaacaggttgctgcgattgacgacagccttttgccgccagtttcgctacaatgtacgccattcttttcaggagtttattcatggcgctgaaagcgacaatatataaagctgcggtaaatgtagccgatctggatcgcaaccagtttctggatgctaacctgacgctggctcagcatccgtcagaaacccaggagcgcatgatgctgcgcctgctggcatggatcaaatatgccgatgaacggctacagtttacccgcggtctgtcgtcggatgacgagccggagctgtggctgcttaacgatcatctcggggtcgatctgtggatcgaactgggtctgccggatgagcggcggattaagaaagcctgctcacgggcgcaggcggtggcgctgtttgcctataatagccgggcagctgaaatctggtggcagcagaatcagagcaagcttgcggcgtacccgaagctgaccatctggtatcttgatgatgcgcaactggcactgcttagcgcctttgccgatcgtaccatgacgctgcaggccactctgcaggagggcagtatctggttatccgatgctcggaataatctggaaattcagcttaccgcctggcaagcgtcggcatgattactattagccgcagcgtagcccttgccgacgacgagatcgtcttgtcaggcattcgcgcccagggagcaggggggcagcatgtgaacaaagcgtcgacggcgatccatctgcgctttgatattaaagcttcaagcctgccggagttttacaaagagcgcctgctcgccgccagccaccacttaatttctgctgacggtgtggttatcattaaggctcaagaataccgcagccaggagatgaaccgtgaagcggcgatcgcccggctggtggcccttattaaagaattaaccgcagtgcaaaaaagtcgccgggagacgcgaccgactcgggcatcgaaagagcgacgccttgcttccaaggcacagaagtcctcagtcaaggcgctgcgtgggaaagttcgccagtgaaggcgtcggcgaacgggtgaaatggatgataaggaaagcaaagtgaagaaaatcgtattctccgtgatagcggcctgttcgctgttcgcgctgtttggttgtaaccatcgcgccgagactgacacggtccagccagcggcgatggaagagctcaagccgatgcagcaaagctggcgaggcgtgctgccttgcgcggattgcgaaggtatcgacacctcgctgttcctggaaaaagacgggacctgggtgatgaatgagcactaccagggcgcccgtcgtgagccgtcttcctttgcctcgtacggcacctgggcacgtaccgcggataagctggtgctgaccaacagcaagggcgagaaatcttactttcgcgcgaaaggcgacaagctggagatgctcgaccgcaacggaagccccattcagtctcctctcaactataccctggagccagtgaaggccagcctgccgacgacgccgatggcgatgcgcggcatgtatttctatatggccgatgcggcaacctttaccgattgcgcgaccggtaaacgcgtcgcggtggcgaacaatgcccagcttgaacgggattatgccgccgcgcgcgggaccgatactcgcccggtactgctggtggtagaagggcactttactctcgaagcgaacccggataccggcgagatgatgaaaacgctgatgacggatcaagccggcaaatttattcccggtaaagactgcagccattgattgtcaggcccctgtccgggtaacgggcaggggatgatcccgcgcagtaccacctacttcctcctgttattagccctgtcacatcaagagtgagcgtggatctggctggcggaaaagcgtcaatcgtttctttactccgcaccgtccttcggtttgttcagccccaccagcttaccggcctgaagataaactcccagtttcaaatgcccgacatactggagctgcgtttcgggtttaaacgtggcgacgtctccttcccgcatgtgcagcagatcggaaggactgatccacgccgcctgcgcgagcgtcagcggatgcccggctcggacaaaggcctcgctgacaaactccgagcaaaaccacgctttcttgtcgccgcttgccgcatcgcccagctgcgctttagccaggccactgacgcactgctggcgaaagtctcgtgagaaggggttgagcgagcagagcggtttggtgaccatataagggataaactgaataatgccgcgatagttatacccgctgtctttgacctgccaggcaaaacttttcatcgtcgttgcctggtccggcgtcaggtcaggcaccctgagagcaaagagtttatcgctgtgcgccagcgcctgctgaagggtaatcacttgtacgccggcgccggtggcttccgcaacctgaccttcgccaacatacagcgcgacgtggcttacggaagaggcgctgaaggcgcggatcccaagcgatgtgacgcccaggctggaggagaacagcaggtcgccggagcgcaggtcgctttcggcgatttcgcgcagtccgctgccggcaatcgagctttgacgctggagggtaacagcccaggatgatgaatggtcatcggcagcagatgtggaaggcgagctgcggccgacgtccagggtacaggcggtaagtaggagtagggcaaaagtaagcagtccgctgcggaggagatgtgcagtcattggtactgtccttgtaaaaaaaaaggccctgacatccgttcagggccctgaggtgggtgttagccttttatcgctttaaccagatattccacaatatccccggtcttaatcagctgcttctcaccgttgcgacgatacttgtattcgatatcatcgttgtcgaggttacgatcgcccagcacgatggtgtgcgggataccgatcagctccatatcggcgaacatcacgcccggacgctctttacgatcgtccatcagcacttcaataccctgggcgctcagctcggcgtacagtttctccgccagctcctgcacacggtaagacttgtgcatgttcatcggcaggatcgccacctggaacggcgcaatcgcatccggccagacgataccgcgatcgtcaaagttctgctcaatcgccgccgctaccacgcgagtcaccccgataccatagcagcccatggtcaggatctggttacgcccatcttcgccctggaccgcggctttcatcgcctcggagtacttcgtccccagctggaagatatgacccacttcgataccgcgcttaataagcagggtacctttaccgtccgggctcgggtcgccggcgacgacgttacggatgtcggccacttccggcgtcgcgacatcgcggtcccagttgatgccgaagtagtgtttgccatcgatattggcgccagcggcgaaatcgctcatcaccgctacagtacggtcgataatcaccggaaccggcatgttcaccgggcccagggagcccggaccggcgttcaccagggcgcggatctcttcttcggtggcgaaggtcagggggctggcgacctgcggcagtttttccgctttcacttcgttcagctcgtgatcgccgcgcaccagcagggcaaccagcggggaagcgctatcttcaaccgctttcaccagcagagttttcacggttttttcgatcggcaggttgaactgctccaccagctcagcgatggttttggcgttcggcgtatcgaccagggtcatctcctgggtggcggctgcgcgcggctctttcggcgcaacggcttccgcaaactcgatgtttgccgcgtagtcggagctgtcggagaagatcacatcgtcttcgccgctctgcgccagcacctggaattcatgagaggcgctgccgccgatagaaccggtgtcagcctgtaccgcgcggaaatccagccccatacggctgaagattttactgtaagcggcatacatcgcgtcgtaggtttcctgcagcgattcctgcgaagtatggaaagagtaggcatctttcatcaggaattcacgggagcgcatcaccccgaaacgcgggcgtacttcgtcgcggaatttggtctggatctgatagaagttcagcggcagctgtttataggagttcagctcgttgcggatcagatcggtaatgacctcttcgtgggttgggccgaggacgaacggacgatcgccgcgatcggcaatgcgcaacagttccgggccgtactgctcccagcgcccgctctcctgccacagttcagatggctgaacgaccggcattaacacctcgatcgcaccggcgttgttcatttcttcacgcacgatgttttcgacttttttcaggacgcgcacgccggtcggcagccaggtgtataacccggaggccagcttgcggatcatcccggcgcgcagcatcagctgatggctgattacctcggcgtcggcaggtgtctccttcagagtggagagcagatattggctagtacgcatgttgtaacggttccagttaaacgagcggaacaggctggttgcccagcctgaaacaaaaaaagtggtttagtttaccagtgtggcaaagatgccaaaagagaggaaaataaaattagcgcgcttcgagggcaaagacttcaaaaccggaggcagtcacccgccagcggacgttgaaatccagcagccagacggcatatgtttttcccgcttgttcctcttttcggtaggccggacgcggatcctgcgccagcacctcgcggataaacgctttgatatgtgggtaacgtttttccagcgtgagtaactgtgcgtctatttccggcgtaaagctgacgttcatacccgccagcggcgcctgctgtgcatagctggcgctggcgtccggcagggcttcggcgaaaggaagatacggtttgatatcaaccaccggcgtcccgtcgacgagatcgaggctgccgagttccagtattacctgatctttctgacagcgaatgcccttgagctcaacgagcgacatgccgatgggattagggcgaaacgttgaacgggtggcgaagacgcccatccgcgcattgccgcccagtcggggaggtcgcaccgtcggacgccaaccgcctgccattgtctgatgaaacacaaacaggatccacagatggctgaagctctccaggccacgcacggcgtcggcctggttatagggcgcgaccagatggagttctccgccgccgtgtttcaccaggcctggctggcgaggaacggcaaacttctctttatacggcgaacggatgacgcctatttgcgcgaactgaaatgcgctcattgcgccgagacgttaagcgctgaacccaggcaaacggcctgacggtagcagcctggcgtaccgctggtcacttcgcagcggtgaagcaggacggcattggctttcatacgcgcggcattaatttgcaggcgcttgcgcgcggtggggatattcggcggagaatcctgattcgaagcctggcaggactcgccagatacttcacccagatcgcggaacggtttaccaaccagctctgacgcatcggtgtaaatacgtactggggccgggcgggtggcgcgcggtttgctcggctcagatttaactggcggggttgcagtgctttgagcaggctcaacgggagatctgcttagcatggaacaaccgcttaacatgagtgctaacaaacagatcggtaaagcacgcatagtatttcctcaatgaataaaaaacagggcgttattgaatcaggtgcttgcataaatgacaagacgggcgtgaagcccgtcctgaatgatattacggtgagaaaagattaccagcctttcacggcaccgccgttaaagatcttgttcgctgcttcgtaaacttcatcgctctggtaagcctgaacgaattttttcacattctcagcatctttattgtcttcacgcgccacaatcaggttcacgtaaggagactctttaccttcaacaaagatgccgtctttcgccggggtcaggccaatctggctggcgtaagtggtgttgataacggccagcgcaatctgcgcatcgtccagggaacgcggcagctgcggcgcctccagttcaacaatcttcaggtttttcgggttctcgacgatgtccagcgaggtcggcagcaggcctacgccatccttcagtttgatcaggcccacctgctgcagcagcagcagagaacgaccgaggttggtcggatcgttagggacggcgatctgcgagcccggctgcagttcgtccagcgatttgattttcttcgaataacccgcgatcgggtagacgaaggtgttaccgacagccaccagcttatagccgcggtctttaatctgctgatcgagatacggtttatgctggaaggcgttcacgtcgatatcgcctttgctcagcgcttcgttcggcagaacgtaatcgttgaaggtcaccagctcaacatcgaggccatacttctcttttgccactttctgcgcaacttcagcgacctgctgttccgccccgacgataacgccgactttaatatgattcggatctttttcatcctgaccgcaacccaccagcgccagagaaccgattaacgcgccaactgccgcaaaagttttgaaattaaaggccatgttatttccttcctgtaagaatgagtgttgtctgccaataacgttatttgtgagtcacagcccggacgatgcgatcgccagagaattgaattaaataaaccagaacaaccagcaataccagtacggtattcatcacggtggcgttatatccaatatagccatactgataaccaatctgacccaggccaccggcgcccaccgcgccgcccattgcggaataacccactagcgtgatgagcgtgatggtggcggcgttgaccagacccggcagtgcttcaggtagcaggactttgcgcacgatctgcagcggcgtggcacccatcgcgcgggaggcttcaataaggccggtggggatttccagcagggcgttctccaccatgcgggcgataaacggcgcggcgccaactgttaatggcacaatcgctgcctgcaggccgatagaggtaccgacgatcacgcgggtaaacggaatcatccagaccagcaggataatgaacgggatggagcggaaaatattcaccagcgccgacagcgtgcggtacagtttggcattggcgacgatttgccccggacgggtaacgtacagcagcacgcccaccggcaggccgaggacaaaaccgaagaagccagagacaaaagtcattgccagcgtttcccatacgccgcgcaatagcagccacatcattgcctcagacataacccaatacctctacttttacatgatgttcctgcagccaggcgatggccgcctgagtgtcttcctgtgtaccgtgcatttcggtgagcatgatgccgaacttcaccccgccggcataatccatctgcgcgctgataatgttgttattcacgttgaagcgacgcgcggtttcagagagcagcggcgcatcgacggagtggccggtaaattccatgcgcagcatcggtacgctatccgctgtggcggtaggtttcaggcgcgcctgatagtcatccggaatatcgaggtgcagagtggactgaataaactgctgagccagcggcgtcttcggatgggagaagacttcgctcacggtgtcctgctcgatcaattgaccattactaatgaccgccacgcagtcgcagatacgtttaaccacgtccatttcatgggtgatcaacagaatggtcagccccagacgacggttaatgtctttcagcagttcgagaatggaacgggtagtggccggatccagggcgctggtggcttcatcgcacagcaatactttaggattgctggccagcgcgcgggcaatcgccacgcgctgtttctggccgccggagaggttggccgggtagctgtcgtgcttatcacccaggccgacaagatccagcagctccgtgacacggcgtttgatttcagcctgcggcgtgttatccagctccaggggtaatgccacgttgccgaaaacggtccgcgaggccaacaggttaaaatgctggaaaatcatgccaatttgacggcgagcgcgggttagctctttctccgacagggcagtcagttcctgaccgtcaacctgtacgctgccctcggtcgggcgctccagcaggttcacgcagcgaatcagcgtacttttaccggcgccggaggcaccgatgacgccgtaaatctgtccggcagggacatgcaggctgacgttattcagcgcctgaatgctgcgattcccctgctggaatactttggtgatattggaaagtttaatcatcagttatttattatcgtttagccgtttgccgtggcattttcttctgccgtatccaggcgatgcctggcaatgaaatggatgttaaggcatccagacgtctaaatcaatctgactctttataatgagcactttcttgcatgcggaaacatgcgatactagcggcactagtctttttcaggagcaaaccggtggcaaagtcagtacccgcaatttttctcgaccgtgacggcactattaatgtcgatcatggctacgtccacgaaatcgacaattttgaatttatcgatggcgtcattgacgcgatgcgcgaactaaaagagatgggctacgcgctggtgctggtcactaaccagtccggtattgcccgcggtaaatttaccgaagcccagtttgaaacgctgaccgaatggatggactggtctctggcagaccgcggcgtcgacctcgacggtatctactattgcccgcatcacccgcagggtgcggttgaggagtaccgccagacctgtgattgtcgtaaaccgcatccggggatgctgatttccgcccgcgactatctgcatatcgatatggctgcttcttatatggtaggggacaaactggaagatatgcaggcggcagcggctgcggatgtcgggactaaagtactggtgcgcaccggtaaacccctgactgaagaagcggaaaaagcggcggattgggtgctaaatagcctggcagagctgccggcggcgattaaaaagcagcaaaaataagcgttgcgtttaaaagatgagcggttgaaataaaattgtatttttccgcttgtcattcccggagagctccctataatgcgcctccatcgacacggcagatgtgaatcacttcacacaaacagccggttcggttgcagagaaaaatcctgaaaaacgggttgactctgaaagaggaaagcgta

SEQ ID NO: 5340 - DNA, 198899 bp, Unknown
  gut microbiota DNA sequence
tccaccggcgcggcctgctgttcggctttacgcgctttggcgcgggcgatggcggcttccaccgccgccttgcgcgggtcgaccggttcggcggccggggcgtccaccggcgcggcctgctgctgcgctttgcgcgcccgggcctcagccttacgcgcttcgcgggcggcaattgcctcgctgttgtcaggtttggcgccggcctggatcacgatcggctgcgcggcatcgcgctgtttatcccgtacccgggccagggcggcgctaatcgcctcctgatctttggcggcaggctgaacggcggcttttttatgccgctcggcgcgcgcggctttctcacgctccaggcgcgcctgtcgggcctcgaatcgggctttggcttccgcagcgcgctgctcttcctgacgaatcgccgcgatctcggccttttcctgacggaagtactgcaccagcggaatattacttggacatacccacgcgcaggcgccgcactcgatgcagtccgccagattatgggcagtggctttatcgtgctgctgacctttgctgaaccagtacagctgctgcggcagcagatcggccgggcaggcgtcagcgcaggcgctgcagcgaatgcagcctttctcttcctgcggttcgcccatctcgctggcggaaggcgccagcaaacagttggtgatcttcaccaccgggacgtcgagccacggcagggtaaagcccatcagcgggccgcccatgatcaccattggctcggcgctggggcagaagccggcatcgttcaatagatggcgcaccggcgtgccaagacgcgcccagacattgcccggtctggttaccgcttcgccggtgagggtgaccacgcgctcggttaacggctcaccgtcaatcaccgcgcgtttcaccgcataagccgtaccgacgttctgcatcagcacgccaatgtccgatgaacgaccgccgtgcggtacctgtttgccggtgagaatttgggtgagctgcttggcgccaccggagggatatttggtggggatcacgcgcagcgaaatgccatgggcgtcgcagagcaccgcccgcagcattgagatggcctgcggcttattgtcttcaatgccgatcagcacttcttcaggctgcagtatatgagcgaggatgcggataccctcgacaatctgcgccgcgcagtcctgcatcaggcggtcatccgccgtgatatagggctcgcactcggcggcgttaatgatcagcgttttaattttatctccgccaccgcgcagtttactgccggtggggaagcctgcgccgccgaggccagcaacgccaaactggtggatacgctcgatcagcgcttcacgcgtgcgggtctgatagtcgctccagccatcgcgctcgatccagcggtcttcgccgtcggcgtcaatgatcacgctcatctccgccagcgccgacgggtgcgcggtagtgtgcggagcgatggcggcaatggtgccggaggtcggggcgtgaacgggcagcattcttccccagccgcgggtcagcggctggccgcgcagcacccggtcgcccactttaacgcacagttcgccctcggcgccaatgtgctgcttcaacgggataacaaagcgctgcggcagggaaacctgacgcagcggggtgccgttagactgggttttcatttcaggcgggtgaataccgccgttgaaatcccagaccttgtcttttcggaaagcggaaaatagcttaaacatgttgttccacaggaatatttcgcaccgggatcgtatgcagatcccatttccaggtctccggggtggtggccaccggaacgagtgaaatgcactgggtcgggcagggggcgacgcacaaattgcagccggtgcacaggtcgctcatcacggtatgcatggcgcgggtcgccccaacgatggcatccaccggacaggcctggatacacttggtacagccaatgcagttcggctcgtcaattaccgcgagcatgcgggccggctccgcttcctgtgcgtcgccgtcgacaggctgcgggtcgacgttcagcaaggcggcgatttttaacatcaccgcttcgccacccggcgcgcagcggtttattttctcaccctgcacgccgactgcttccgcataggggcgacacccagggtacccgcactgcccacactggctctgcggcaatagctcatcaattttttccaccaccgggtcgtcctgcaccgcgaaacgacgcgaggcgtatcccagtattaagccgaaaatcagccctaacaggctgatggcgatcacggctatccagactgcgctcattacaacttcaccaaaccactaaagcccatgaaggccagagacattaaaccggcggtaatcagcgcgatggcattaccgcgaaacggcgcggggacatcggccaccaccaggcgttcacggatcgccgcgaacagcaccattaccagcgagaagccgacggcggcggcaaagccgtacagcgccgactgcaggaaattgtggcccagattaatattcagcagcgctaccccgagtacggcacagttggtggtgatcagcggtagaaagatccccagcaggcgatagagcgccgggctggttttacgcaccaccatctcagtaaactgaaccaccacggcgataaccagaataaaggccagggtacgcaaataaaccaaatttagcgggataaggatccaggtatcaatcagccaggcgcaaatagaggccagggtcatcacgaaggtggtagcgagccccatccccattgcggtttccagctttttggaaacccccataaacgggcacagaccaagaaacttcaccagaacgaagttattgaccaggactgtaccaataaagagcagtaaataatcagccatcatgcgacctgaaacgaaaaaaagccgcttattatcgaataaaacgataccagcgacaacaggttaagtgtgggggtattacggattaacaaaagtccgttttacccgctgcgaacggcgaaaatagggcgccagcagcgcagcggccagcagcggaaacagcagctgacgcagggcaagcacatccgagaccggcgagaaggcaaaagcctttatcgccagcagcagggtgatgagcagccagataatatagtgtttcggcaccaccgagcgccgcttgaaaaaggcgatagtcagccagagcgtgtaataccacatggcgagggcaaacagcagcgaggcgacccacagcgccatatggcccgcgctcatggcgcgcagtagggtataggtctgcggcgacatcagcgcattggcaaaaaacagcagcgataacgaggcgctcagcagcgccaccagcaaccaggccagcggagccagcagccatccgccgatgcgctctgcagattgagacgtcatgtttctcccctattcaacgccagtgaataaaatcaggccgggaagtataagcaactggcgtgaaggatgacagccttactgcacgaatcgccaaacggatttaggaacctggcccacatcgaacaatttaccaccggagaccagctctgcgcgacgatgatcggcggcgcgatacatattcacgatctcctgggtgtcagtcagggagtagttaaggtgatcaaatagtttttcaaggctttccagcgaactgattttgcgaaattttaataagtagtccagcacggtcattttcgtatccattttataatcggaattattgcgttgaatattatcagcattcactaaacctactctcaaccaacggcgccttctgctggggccgcgtggaatgaatcaggttatataaacccatgacaaggggcaaagccagccttgaagagcagggagaagtttaagaatattctaaaatcagaccgggcgccgaatggcgcccgcaagagaagattaacgctgttcgccgtgactggcaataacagatttgtaccaataaaaactcttctttcgtttccgcgccagattttgctggtgatcgacatagacaaaaccatattgcttttgatagccgttgagccagctcagcagatcgataaatgaccaggggtaatagccgcgcacatctgcccccagcgccagcgctttttcgagggcgccaatatggctgctgagataatcaatccgcgggtcgtcgaccacttccccgtcaataatcgggtccttcgcgccgaggccattctcggtgatatatatcggaatatcgccatagcgcgccttaatcatcataatgccgtcagttagcccctgcggccagatttcccagccccattcggtatatgtactctggggattacgcacgaaatagaataatccctccacgccaggctcgccgccggtagcgatcttaggcggctgggcagataccgtttcccggcgatagtaattcagaccgataaagtcgcagcggttgtcacggagcagcgcgtcgtcgcctggagcaaagcgaggtaccccccacagcgcctgggtctgcgccagcaggtcggcaggataggtgcctttcagcaccggatcgtacagccagtgagtatggatggcgtcagccagttcggtggccttaatgtccgcctcgctgtcggtgagcggggtatgcggttgcagtacgttgacgaagccaatctcgccggccacagccatctcgcgaaaggccttcaccgccagcgcatgggcgataaatacgtggtggcaggcctgaatggcgcgcgccggatcgcggaccgccgggggatggaggccgttaatgtagccgtgcccaatgaagacaatggtttcgttgaaggtagcccacagcttcacccgtgaaccaaagcgcgcatagcacaggcgggcgtactcggcgaaggcctcggcggtagtgcgcgcttcccagccgccctcatcctgcagggcctgcggcagatcccagtgatagagggtgatcatcggctcaatattgtgcgccagcagttcgtcgatcagatcgctgtaaaactggactcccgcttcattcaccttaccgcgcccggcgggcagcaggcggggccaggagatggagaatcgatagctttgcaggcccatctcggccattaacgccacgtcttcgcgaaaacggtgatagtggtcgacggcaatatcgccggtggtgccttcaaaggtggtacccggcagatgagagtagatatcccagattgacggtcctttaccgtcggcgtcgtgtcctccctcaacctgatacgctgcggtagcggcaccccataagaaattgtgcggaaaagcggccatgaaaaagctccctgtctgatgataaagggagtgtaataaaagcgcgaacatatgtgcaaccggtttctgaaaccggttgcacagttgcgaggcgggtcactgttttaacgcggagctacttcgtgtgcaccacatccgctggcggtggggactgatagttatctatatggtgtgcgataaccaaaagcagtgccgaaataccaaaaacaatccagccaataagttctacaatacgggtaaaaacacttgtcataacacttcaatatcctttgaacacagcgtggaatgttactcgatggtcagcagatcacaaggggtatctgtctgatttctcacacttgcatgtaagtcacaaagtaaggaatgataagttttgctcacggtttgtaaaattattctcattaacctggtgttgatatcagttgcataagcgaggcggtaagatgagcgatgcgatccgggtggggctggtggggttcggttacgccagcaaaacgtttcatgcgccgttgatcggcggcacgccgggtgtggcgctgaaggcggtcgccagcagcgacgccgaaaaggtccatgccgattggcctggcgtgaaggtaatgagtacgccgggggatctgctggacgacccggatatcgatctggtggtcatcgccaccccgaacgacacccactttccgctggcgaaagcggcgctggaggcgggaaagcatgttgtggtggataagccctttaccgtgacactgtcacaagctcgcgagctggaaagcctggcgaagcactgcggtcggatactttcggtgtttcataaccggcgctgggacagcgatttcttaacggtcagcgcgttgatcaacgaaggtcagctgggggaggtgtgttacttcgagtcgcatttcgatcgcttccgaccacaggtgcgtcagcgttggcgtgagcaggcgggtcctggcagcggcatatggtatgacctcgcgccgcatctgctcgaccaggtcgtggtgctgtttggcctgccggtaagcatcacggtggacctcgcgcagcttcggcccggcgcgcaatccaccgactattttcacgccgtgctggcctatccgcagcggcgggtagtactgcatggtacgttactcgccgccgcggagagcgcgcgctttatcgtccacggctcgcgggccagctatattaagtacggtcttgacccgcaggaggagcggctaaaaaacggtgaacggctgccgcaggaggactggggatatgatatgcgcgacggtaccctgacccgcgccgaaggggatgaacgtagtcaggagaaatggctgacgctaccgggtaattatcccgcctactatgccgctatccgcgacgcgcttaacggcgtaggggaaaacccggtcccggccagcgaggcgattcagataatgaccctgattgagttgggtatcgagtcggccagacatcgcgccacgctcagcctggtctgaggaggagcccggcagcacggctgccgggccggttatcagcctttggcaacccgctgaatgagggcggctttttcctgttcgccgaggaacgccagggtcaggccgttgatctgcgcctgacggatctgctcccggctcagccctgccgccggcgccgccacggtatactcgtgaatgatgtccacaccctggaccgccggatcgtcggtgttgaggctcgccagcacgccgtgctcaaggaactgcttcagcggatgctgggccagggaggccacggtgctggtttgcacgttcgaggtcaggcaggattcaatcccgatgcggtgctcggccaggtagtccatcagggctggatcctctaccgctttaaccccatggccgatgcgctccgcgcccagctcacgtatggcctgccagatactttccgggccggccgcttcgcccgcgtggacggtgatatgccacccggcgtcgcgggcctggttaaaatggttgcggaacaacgtacccgggaagcctagctcatcgccggcgaggtcgagggcagtgatgccctcgcggtgggcgagcagcgccgccagctcttcctgacaggcggcttcgccgaaggtgcggctcagaataccgatcagccgggcgtcgacctggaaatcgcggcatccctcttgaaccccggcaattaccgcctctaccacgccgtcgaccggcagccggtgggtcatcgccatatagcggggagagaagcgcagctcaacgtagtgcaggccatttcgcgccgcgtcttcgacgttctcatacgccacgcggcgacaggcttccagcgaggccaggacctttaccccccagtcgagcttggcgaggaaactaaccagatcgggctcaaggctggtgacctggacatgaggacgcagcctgtcgagggtggttgcgggaagagcgatattaaattcgcggccaagatcgaggatggtttgggcccggatgttaccgtcaagatgacgatgaatgtcggttaatggcaatgaggaatcaatcatggtcgcactctttttttagttaaagtgcacgtcattatacaacatgaacataactgtttaaaagcattgaaaaaatgcatgcgatacaaatagctggcagcaatctggtcagcgttacggtctttttgactggcccctttaaaacgcagaacgaatatcatgattgacgcgatcctgaccagatcagaaatgcacacgcgctgaccgcggcccccgcaaggcagaccgcctgccatccccagtgggaataaagctgtgtggcaacgatagcccctgccgcgctgcccagcgaataaaaacacatgtaagccccaaccaggcggcttgccgctgcaggcctggcggcaatgatcaggctctggctggagacatgaacggcctgtaccgcaaagtccagcgcaatgacgccagctatcagccagagcagagaggtttcggcatagccgataggaagccatgagatggtcagcagcgccagcgccaggccggtagtgcgctgagcccatccctggtcagcccacttgcccgctctggcggcggccagcatgccagcgaagccggctaagccaaacatccccgtctgggtgtgcgagagggaaagggcggtgagcggcatgaccatggtcgtccatagcatgctgaaagcggcgaagataaatagcgccaggatcccgcgctttctcagttgcggctcggtgaggtacagctgaaacacggacttcaataaggaaaggtaagtcggcttttgcggctgcggctgctgcgggggcgaaggcatgattttccagacgacccctgcaatcaccaacatcagacaggcagccgtgagatacacggctcgccagccggcgatatcggctatcgcgcctgagataaaccgagataacaggatacctgaaacaatgccgctggtcagggtacccaccgcctggcctcgtttctgcggcgtcgccagtactgccacccaggccaccagcacctgcaccaccacggccatcaggccgacgatcagcatggcgccaagcagcgttgctatattgggggataaccctgccgcgactaacgccgctactgaaagcaacagttgactcatcaccacgtatttacggttcaaccagtccccgagcggaaccaggaacagcaggccaatggcatagcccgcctgcgtagcggtgatgacgctgccaatcatgcctggcgacaccttcaggctgaccgccatcgagtcgagtaaaggctgtgctgaataaacattggctactgccagcgcgcaggttagtgaaaacaacgccgttatccctgtggtcagcatcgtgtcagggactgacgcagtttggatcctttggccggtacatctacttgccttgcatttcataagaggccctctggctggttgctttttaaaactagtatgtctatagaattagccttagtggtttttttttgcaactggtaaaggtgaggattaagctagatcagtagataaattgataaggagcgcgcagatggcaaagcaggaatcacttagaaccagtgaatgtccggtggcgagaacgttggaatcaattggtgaacgctggtgcctgatgattatccgcgaagcatttgacgatgtgcggagattcagcgagtttcaaaaaaatttggggctggccaaaaatatccttgcctcgcggctgaagcatctggttgatatcggtattttcgagattttaccggcatcggatggcagcgcatacaaggaatatgtcctgactgaaaaggggcgctccgtgtttcccattgttgtggcgctgcggcaatggggagagcgttatatgtttgagcaaggggaaacctattcggtcctgctggataacgcgcacggccagccccttcagtatctggatgtgcgttccgctcagggggataaactgcaaccaggcgactgtcatcgccggcgcattgtgtcagatacccgcgccgaataatggcgtgaagaatttgcaggataccagcgagaatacgagcgtaccgctaaagggtcatggaacaatcctgacgtgtttttttgcgaactgcttttgatgccaaagctccggacgcgtgaaagtgacccaccgccaaccgcaggaggcggtgcataaccatttacaattatattttatttgaatgtattcatgttacatattaaattctgcttactttatcgacgatgaggcaaggatgcggatgtggagagcgtaatccataacaatattgagggttttctgctgttgttattaagcatgtggccgattctgctggtggtattcattggcgtcgcaatttcattctataccatgctgttacgcaagacggcgctggcctgcctgcttttcgccctcgccatcggcgccgcaggctggagtctcgcttagccgctggcctcagggtttatccagcaggctcatactggaggtggcggcgccatcattcagattggcgggcgaatgccagtcgcgacccgccagcgcactgtcgctctgtccgctgccgacgccttgctgcgtcgacagcgatgaaccttccagtgcttcatccgcccctgaccgatcgggcagggaactggtatagccgccattattcgagtacgtatccatgccgttgacttcgttaggcaccgtgtcggtagtcgtaccgtcatcgttaatgcaaaacgagccgccaatgccgtttggctgacagtctgcagcaaaagccggactggccagcgcggtcagtagcaataacggtaagccgatttccttcattcttatctcccagggccgtgtggtctgccagacattctgtactatagcggcggcagtagcgcggtaagtaacaaaactgtgtaattttgtaatgaccggtggacggtttgtcgttcggccaggaaagagcgtgcgctaagcgtggcatagcggctcggcagaaagcggtaatcaattgttaattctacgtaaaggttaatgaaaatttaagggaacgccgctatgttggcagcatcatactttccataaaggatatgccatgcgcgataaatattccggcctgcagattgggattcactggctggtttttttgctggtagtagtagcctatgcggcgatggagctgcgcgggtttttcccccgcagtgaacggccattgattaatatggtgcatgtttcctgcgggatcaccattttcgtgctgatggtggcgcgtctgctggtgcggctgaaatcgccggcgccgccgatcgtaccgaaaccatcgccgatgatgaccggtttcgcccatcttggtcacctggcgatctatttgctgttcattgccttgccgttgatcggcatggtgatgatgtactggcgcggtaacccctggtatgcctttggtctgaccatgccgtatgccccgcagagcgattttgagcgggtggataccctgaaggcgatccatgaatggttggccaatgccgggtactttgtgattggcctgcatgctctcgccgcgctgctccatcattactggtggaaggataatactctgctgcgaatgatgcctcgtaagcgctaaatcatcctctttcacttcctgaccccgtcccgcgacggggttttttttgccttcaccgctaatagaatatagtatacccccctatatgatacggaggcgtaatcgtgccacattcacctgaagataaaaaacgggcgctcagccgcgtaagacgcatccgcggccaggtcgaagcccttgagcgcgcgctggagtccggcgagccctgtatgactattttgcagcagatcgcctcgattcgcggggcggcgaacggcctgatgggcgaaatggtggagatccacctgcaggacgagctggtcagcggcgacaccacccctgagcagcgggccgcgagaatggcagaggtcggtcatctgctacgatcctatttaaaataacatcacgacgaggaagagacagttatgaaatcacgcgcagcagtggccttcggccccggtcagccgttaaaaatcgttgagatcgacgtcgcaccgccgaaaaaaggcgaagttctggtgaaaatcacccacaccggggtgtgtcataccgatgccttcaccctctccggtgacgatccggaaggtgtcttcccggcggtgctgggccatgagggcggcgggattgtcgtggaagtaggcgagggcgtcaccagccttaagccgggcgatcacgtcattccgctgtataccgccgaatgtggcgagtgcaaattctgtaagtcgggtaaaaccaacctctgtcaggcggtgcgtgccacccagggtaaaggactgatgccggacggcaccactcgtttctcgtacaatggcgaaccgatctatcactatatgggcaccagcaccttcagcgaatatacggtttgcgccgagatttcgctggcgaaggtcaatccgcaggcgcctttggataaagtgtgcctgctgggctgcggcgtaaccaccggtatcggcgcggtgcataacacggcgaaggtcaaggccggggatagcgtcgcggtctttggtctgggcggcattggtctggcggtgatccagggcgcggtgcaggcgcaggccgggcgcattctggcggttgataccaacccggataagttcactctcgctaaagagatgggcgcgaccgattttatcaatccgaacgactacgataagccgattcaggatgtgattgttgagctgaccgacggcggggtggatttcagcttcgagtgcatcggcaatgtaaatgtgatgcgcgcggcgctggagtgctgccataaaggctggggtgagagcgtgatcatcggtgtagccggcgccgggcaggagatcaagacccgtccgttccagctggtgaccggccgcgtgtggcgcggttccgccttcggcggcgtaaaagggcgcagtcagctgccgggcatggtggaagacgccatggcgggtaaaattcgcctcgatccgtttattacccatcgcctgccgctggagcagattaacgaggcctttgatctgatgcatgaaggtaaatcgattcgcaccgtgatccactttggcgaccagtaatccccgacgctgaaggcgaatcgtcacccataaaaaaagggcccggatgggcccttttgtgtatgtcgatcagtgatggtctgggagcgcgtaggcgatgatgtaatcgccgcgatccggtgactggcgggcgccgccggcattgataatgatgtactgcttaccggttttcggtgagacgtaggtcatcgggccggactggctgccgaccggcagacgcgatttccagatctctttgccgttcgcggtatcaaaggcgcgcaggtagaaatcctgggtgccggcgaagaacagcagtccggactgcgttgccagcgatgcgccaagggtcggcatgccgattggaattggcatgtgcatacgtatgcccagcggcccggtgtcttctacggtgccaaccggcacctgccacaccagtttcccggtattcagatctaccgcggacatggtgccgaacggcggcttctggcacggaatgcccagcggcgacaggaaacgttcgcgcatcgcgccaaacggcgtgccttccatcggcacgatgcccatctcgatcccgctggcgtctttcgccaccttcgcgcgcggcaccatatagttggccaggcccagacgcatatcgttgacaaacatcaggctgttgtttggatccagcgaaacactgccccagttcatgccgccgagcgagcccgggaactgcagggaacgatcttcacctggcggggtaaagacgccctgatggcgcatctctttgaactgaatacggcacagcagcaggtcgatcggtgtcgctccccacatatcggactcggtcaacgtctggttgccgatcatcggcatccctaccgagtaaggttgcgtcggcgagtagcgttcacctttgacgttgcccgccggcaccggacgctcttccactttggccaccggctcgccggtctcgcggttgagcataaagatcatgccctgcttgctggtctgcaccagcaccggggtggtgccgcccttgccgtcaggcagatcgtacagcagcggctgagacggcaggtcaaagtcccacagatcgtggtgtgtggtctggaagtgccagcgcacctggccggtggtggcatccacggccacgatagaggagctgtatttatcgtccagcgcggtacgttcgccgccaaagaaatctggcgtggcgttgccggtgggcagatagatcagattcagcttcgcgtcgtaggacatcgccgaccagacgtttggcgtaccgcgcgtgtaggtctggccttccggcggaacaccggtcagcgctggattgcccggatcccacgcccatgccagtttgccggtgtggacatcaaacgcgcggaccacgcccggcggttcgccagtggagtagttatccgcgacgcggccgcccaccaccaccacattgcccgccaccagcggggtggaggtctgctgatagtaacccgctttcacttcacccatgccgacgctgaggtcgacaataccgccatcgccgaagttttcgcacagtttgccggtatcggcatcaatggcgatcaggcgggcgtcgatggtcggcaggaacagacgacgggaacaggcggccggctgcgtgcctgacgctggcgcggtttgcgcctggctatcttcgtaataccctaagccgcggcagcgctgccagttgggtgaagaggatttggagtcatagcgccatttctcttttccgctgtccacatccagcgccagcactttactgtaaggggtacagacgtagagagtatcgccaatctgcagcggggtgttctgatcttccgcgccggagccattgctctgcgggatatcgccagtatgcgctacccaggcaacctgcagctggttgacgttttgtttgttgatttggtcgagggcggcgaaacggtcgccgtgggtggtgttaccccagtgcgcccagtttttctgctgttcgcctggcgcgacgggcttgactggtaccgcttcagtcgcgctgaccagcggtgcggatttgaacatccagccaaagctcaccgccagcgccacggcgagaacggcggcgacgccataggccgggccttttttcgccggtgggctggcgaggaaaggccagaccagggcggccaggaaggccagtacgccgagcgcaaacaggcgcgagaagagcggccagtagttccagccagcgtcactaatcgcccagatcaccgaggcgataaacgccacggcgtataacagaataccgccgcggcggttgcggaaaatcaacaccgccgcgatgaccatgaccacgcccatcagcgcgaagtacagtgtaccgccgacgagggccagttttgccccaagaatacccacagccagaccgatgatgagcatcagtccggcgagaagccactgcaggatccgggggaatccgcgcggcgcattgccagttgccatgtaatctccttaaccacactagccacctcactgtgaaccaaatgaaacatgtttcttttgaatcatttttgaatgaagtggttttaaccttcataatactgtatttgttgcttgattagatttcgagtgaaccatttggtgaaatcgagacatgatagatctgttaaagaagtttgcgcaaatgttaataaataatttcgcactaaatgattattttgccgaatatgtctaacgtcatggggagcggcgtcggcgcgtttgcaggttccccggccgctgcgggccggggagaaaggggggtcaggcaggcatggacttacggatagcgctgagcagcgtctgcgtacccggggtcagtgtcgcatcgacgcgggttaaaatgccgatgggctctccggcgccctgggtggcgatcggcagggcggttagcacgccacggcgaagatcgtcttttaccgccccggaagggacaaaccagacatagtcaaaatccaccgtcagctggcgcgacagggaggcggagagggtctcgatgcagccggcgggcatcttacagccctggctctggagcagcgcttcggcgttttgccgcggcacggtgcctttaggtgagaccaccaccggccactccatcacccgactaagggtcaccgtctcctgaagcaggggatgtcccgggcgaaccaccagcttcagggattcaaggaacaacagttcgtaatgcagcccgctcatcagctccgggtcggacatacgtccaatgccgatgtcgatctccccggattttaagccggcgagcagcatggtgttgttcatagtggcgacctgcagcgtgatatctttttgctgcttgtgaaactggccgatcaccgtcggcaggatccccagcgcggcggtgggcagcgcgccgatgcgcacgatgtcgttattcaggccctctttgcggttcagcgcctggccggccgaattaagggcgtcaagcaccttaacggcatgcgtcagaaactgttcgccgaccagggttagctgcgccccaagacgaccccgctcgaacagccgggtaccagtcagctgttctagctcgttaagcgttttcgagagtgctggctggctcagatttaatgtttcagccgcgcgccccagcgttccctgttgagcgacggccacgaaggtgtgtagatggcgcaagcgaatgcgctgactgaagagaccatttttttccatagtaagatgatgttaaaaacacagcggtgaaagagacaagcggacttgtttaaatttgataaccagatagcaaaatattattaacatttgagttggttacatgacaagatctttccctgtggttgaaaacgccttcgccccgcagaaacggggcgaaggtggtggtcaccgcgacggctaaatatcgaaaaagacggtttcgttctcgccctgcagatgaatgtcaaaacgatagaccacttccgtaccgcgaacctcgcgctcggcgattaaggttttgcgcctcacctcccactcgatgagattcagcaccgggtcgctggcgttggcctcgtgttcatcggcaaagtacatccgcgtattcaggccaatattgatcccccgcgccaccacccacaggttgacgtgcggcgccatcagccggccatcgcgaccgaccaccgggcccggcttgatggtttcaaagcgccaaatgccggaggtgaaatcagagcaggtacgcccccagccgcggaaggccgggtcgacggctttctgctgttgacgatcgtcaggatggttatagcgacccgcggcgttggcctgccagatctccagcagcacatcgcggaccggcgtcccggagccgtcgatgacccggccttcaatggtgatgcgctccccggcggtatcggcggtagtgaggaccgggccaaaatttttctcaaaaatatgaaagcctgcggcgtccggcgccaggccgatatgaacatagggtcccgccgtctgcgaggcggtttcaggcagatactctttcatcgggcggccccctgagtacgattttcaaacagcgtggcgcggtggccgcgcagaacaaggtcgaagcggtaggccagacaatccagcggtacggcggcgtgcatgtccagctcggcgatcagcgtgcgcacggcgtcgtcattattaatagtcctgacgatcgggcactgcttaatcagcgggtcgccttcaaaatacatctgggtgatcaggcgctgggcccaggcgtcgcccgagagagaaaaatggatatgcgccggacgccagtcgctggcctggttgcgccaggggtaggggccgggtttgatggtgcgaaaacagtaatagccgttttcatcggtaagcacccggccgcaaccgccaaagttcgggtcaatcggcgccagatactgatcttttttatgccggtagcgaccgccagcattggcttgccagacttccaccagcgtatttttcatcggtcggccgaatccatcgcgcacgtaaccgtggacgatgatccgctcgccgataggcaggccttctttggcatagttcaggattaggtcattatccagagggccgaggtcgtcgcggctaaataccgggccggtgatctctgacagcgagttctgcagagagatgagggcgttttttggcgagcgcaggacgctggttttatagcccggcgcgtaagcgggcgggtggcttctgtaatcgcgatggacaacctcacgtggggaccatttgtcgttcatagggtactccgtgtagacggtagaggggcatattgttgtaatgtcgccagaagcagtgtgtgtaaatgtattgttaatttaaagtgaaattaccgggtgtttttcataactatgggttatgttttgcgcaatgacctgggccggcggcaggttatcgccatcacagtttgtaaattcttccccccgccgcgaggcagctttcctacactccaggaagtattcactggaggtaacacatcatggcgaacaccatcacggctgatgagattcgggagcacttttcacaggccatgtcggccatgtaccagcaggaagttccgcagtacggaacgctgctggagctggtggctgacgtcaacctggcggtactggaaaataatccgcagctgcatgaacagctcgctaacgctgacgagctggcgcgcttaaacgtggagcgccacggcgcgattcgcgtgggcacagcggaagaactggcgacgctccgtcgcatgtttgccatcatggggatgtatcccgttagctattacgatctctcgcaggccggcgtgccggtccactccacggcgtttcgtcccatcgacgatgccgcgctggcgcgcaatccatttcggattttcacctcgctgctgcgcctggagctgattgaaaatcgcgccctgcgcgagcgggccgaggcgatcctcgcgcggcgcaaaatcttcaccccccgctgcctggcgctgattgcgcagtatgaagcagagggcgaattcacctctgccgacgcgcgcgagtttgtccaggaggcgctggagacgttccgctggcaccggcaagccaccgtcgatgaggagacttaccatgctctgcatcgcgagcaccgcctgattgccgatgtggtctgtttcccggggtgtcatatcaaccatctcacgccgaggacgctggatattgaccgcgtccagtccctgatgccggagtgcggtattgaacccaaagcgttgattgaagggccaccgcgccgggaggtcccgatcctcctgcggcagaccagctttaaggcgcttgaggagccggtgatgttcgccggagaacaccgaggcacccatagcgcccgctttggcgaaattgagcagcggggcgtggcgctgacgccgaaagggcgcgcgctgtacgatcggctgctgcaggcggcaggaaccgggaaagaaaatctcagccaccagcagcatctacaggaggtgtttagcgaatttcccgacagcgaatttctgctccgtcagcaggggctggcctggtttcgctaccgcctgacgcccacgggtgaggcacatcgccaggcgtttcgcccgggcgacgatccgcagccgctgattgagcgcgggtgggtggtcgcccagccgattatttatgaagactttttaccggtcagcgcggcgggcatttttcagtccaatctgggcaacgagacccaggcgcgcagccacgggaacgccagtcgcgaggcgtttgaggcagctctgggctgcccggtgcaggatgagtttgaactataccgacaggcggaggagcgcagcaaacgacgttgcggtctgctgtaaaatcagtaccctgctggcatcagccttacagggagcaggttatgcaacatccgtcgaaaccgttggcgaaaacccgtcagggaacgcttgccgggagcgcagaacaggggattcatatctggcgcggcattccgtacgccgcgccgcccgtgggcccgctgcgctggcgcgcgccgcagccagccgcccgctggcagggggtacgtccagctgagaccttttccgccgccagctggcaggacattgactactgccgcgagctcggcggcggcgatcctggcgccttcagcgaagactgcttatatctcaacgtctgggccccggccagcgcagcgcagccgctgccggtgatggtctggctgcacggcggcgggtttaccatcggcgccggcagcctgccgccttacgatggcaaagcgcttgccagccgcgacgtggtggtggtgacagttaactaccggctgggccatctcggttttttcgcccatccggcgctggaacaagaggcgggcgaacgtctctataatttcgcgttgctcgatcagattgccgctctgcagtgggttcaggagaatatccacgccttcggcggggatgccgccaacgtcacgctgtttggcgaatccgccggggcgcgcagcgtgctgtcgctaatggcctccccgaaagcgaaagggctgtttcataaagcgattattcagagcgggtatacgctacccgatctgccgcgggaaaaagcgctggaaaaagggcgcctgctggcggaacacttcgccttaccgcaagccagcgctgaggaattgcgggcgatcccggcggaggccttctggtcgctcactgcgccgctgaataccgggccagcgcctattgccggagacgcggtgctgccgcagccgatgctggagaccttctttgccggccgccagcatccgataccggtgatgatcggctccaatagcgatgaagccagcgtgatggccgtgttcggcgtcgatatcgccggacagatccagaagctgcgccgagagcgccgtctggggctggggctgatcaaactcctctatcccggcgtgaagggcgatgaagcgctggggcgggaagtatgccgcgacatggccttcaccacccttggttatgtagtgatgcaggcgcaacagcgcgtgggtcagccgtgctggcgctactggtttgattatgtcgcggaagcggagcatgacgcctacccgcatggggcctggcatggcaacgaggtgccctacgtgtttgataacctgcggttgaccgacccggtgcggcagtacgccagcgaagcggatctggccttcgccgctcaggtcgctgactactgggcgcagtttgcccgcctcgccagcggcgagcagacgctttccggcgcggtgcgctggccggcgtgcctgcgcgggcgggatcgcctgttgcgcattggcttgcataagcgcgccgggtttaaagtggagaaccgctttatgcgcgccagactggcgctgtttcgccgggtgatgaagcatcacgtgacgctggaataaatcccataatgcgcaactgtcgccaccgaccggtggcgacgttatctcacatgaccaccaccggcttgatcaccttgccggacgccgaatcggcgaaggcctggttgatatcggccaacggatagcgggcgataagcttatcgatagggaattttccctgtttatagagttgcaccaacagcggaataaacagcgccggcacggcgtcgccttcaatcaccccgaccagcgattttccctccgccatcaggtcgttctgcacgttaagggtgatatctccggtaaagcccacaatcgccaccgttcccagcggtttcaccgcgtgtacggcctgcagaacgatagcggagacgccggtcgtttccaccgcgtagtgggcgcctttaccggtgatttgtttaatcacggcgacggcatcctgttccttgccgttgatctgatgggtggcgcccagttcgcgcgccagggcgaggcggctggcatggatatccaccgcgataatctgtgaacagccggttaatttcgctgccatgatggcgctgagccccaccgcgccgcagccaaacaccaccagcgattcgccgaccaccggtttcaggcggttgagcaccgtcccgctaccggtctggataccgcagcccagcgggccgagcagggtgagatcaacctccgggtcgaccacgaccgcgttgctggcgcgggtgaccacatactggctgaaagacgactggccaaagaacagggacagatcctggtctcccagccggtagggggtggtgccatcctcgcgtcggccgccaaaattaagcgtattaaaatcttcgcaagccgaagggtggttgcttaaacaattttcgcagtggtggcaggcggcgtagctgagcactacgtggtctcctactctgatgccgctaaccgcctcgccgacgctggcaacgatcccggcgccttcatggccgaggatcgccggcataggcaccaccccggggttgtcgcgcatcacggcgtcggtatggcagacgccggtggcgacaattttcactaatatctcgtccttccccggcggggcgacctcgacgtctttgatgacaaaaggctgctggtagcccagcgtgacggctgctttcacttgcatggcatgactcctgaatgaattccctggagagcgtggcgggacagcccgaacggctctcccctgttggccgctaacgtgaagaaagatagcggttatcggggaaaagttagcaccaggcgcgatggaaatttgcgcgaatcgtgcctaaaaaacgcgcgcggcgaggagcgatacatgggatgaatattcagcactggagaatagatttcccttgaatagtcaggggtaaaaagcggcaggcagcgtgtatgcccaggctacacgccagaggaaatgaaaaaaacaggctgttcctctggacagggcttttttaccttttttctgctggcaacaattggattattaatcgtttttgtctagagtgggcggaaattatcacgcagcgtgatgacgcgttgcgaatcaattcacccgtgcagaaggacgctttctcaggcatgaaccgcagacgttttcttaaatcttccatggctgttgccgccgtatgcggaacgtcaggagtcgcttccttattcagtcaggccgcttttgccgaagacgcgggcattgccgacgggcaaacgcgtcgttttgattatgctgttctgcaggcgatggctcacgatctggcgcgccagccgtggggcggcgccccgcgcgatctgccgccgacgctcgccaatctcaccccgcaggcctataacagcatccagtacgatgccaaccactcgctgtggaacaatattgaagagcgtaagctggacatccagtttttccacgtcgggatggggttccgtcgccgcgtgcggatgttctctttagacgccagcacccagcaggcgcgcgagatccacttccgtccggagctgtttaagtacaatgacgccggtgtggatacccgtcagctggaaggacagtctgacctcggcttcgccgggttccgggtgtttaaagcgccggagctggcgcgccgcgatatcgtggcgttcctcggcgccagctacttccgcgcggtagacagcacctatcagtatggcctgtcggcccgcggtctggcggtggatacctttaccgataccccggaagagtttcccgactttacgtcgttctggttcgaaacggtcaaaggggacgccacggtgtttaccgtttacgcgctgctggacagcccgagcatcactggcgcctacaagttcaccatccactgccaggatacccaggttatcatggacgtggaaaaccacctttacgcccgcaaggatatcaaacagctgggtatcgcgccgatgaccagtatgttcagctgcggcaataatgagcggcggatgtgcgacaccatccatccgcaaatccacgactccgatcggctgtcaatgtggttgggcaacggggaatgggtctgccggccgctgaataacccgcagaagctgcagttcaatgccttccaggacaagaacccgcgcggctttggtctgttgcagctggaccgtgatttctcccactaccaggatgtgatgggctggtataacaagcgtcccagcctgtgggttgagccgcgtaaccagtggggcaaaggggcggtcagcctgatggagatcccaactaccggcgaaacgctggataatatcgtctgcttctggcagccggaaaaggcggtgaaggcgggcgacgaactggacttccgctaccgtctttactggagcgcgcagccgccggtgagcactccgctggcgcgcgttctggccacccgcaccgggatggggggcttccccgaaggatgggcgccgggtgaacactacccggataagtgggcgcgtcgttttgccatcgactttgtcggcggcgatttgaaggcggccgcgccgcgcggtattgaaccggtgatcaccctctccagcggggaagcgaagcagattgagatcctctacgtcgagccgttcgatggctaccggatccttttcgactggtatccgaccaccgactcaaccgacccggtggagatgcgtctgttcctgcgctgtcagggagaagccatcagcgaaacctggctctatcagtatttcccgccggcagcagataaacgcaactacgttgacgaccggatcatgaaataaccctgagtcacccgacgcccgcaggcagtccctgcgggccagaagagagcgctatgaccgcagatatcccagcagtacctgagtcgatcccggtaaccgacgcgctgacgctaatcgccattgatgagcgctacgttagcgacctgcaccagctggtggtcaaaaaccagcgctggctacagcagtcgctcagttggcccgccgaggtgcgcagcgaagacgagacccgccgtcatgtgcagggcaacgtgatgctgcatcagcgggattacgccaaaatgtttttgctgtttctcgataagcagctaatcggcgtcctgtcgttcaatcagatcgagccgcagaataaaacggcctatattggctactggatcgatgaagagcaccaggggcaagggctgctttcccgttcattacaggcctttatccgccattatgccgccagcgggctggtgcgccggtttgtgatcaaatgccgggtggcgaacacccgcagcaaccaggtagcgttgcgcaacgggtttgttctggaaggctgtctccgacaagccgagtatctgaacggtagctatgacgatcagaatatctacgcccgcattattgaccgcgatgaggcattaaagcgcgcctaacagcggcgtgcgggtgatgtgctgctggccgtcaagcgttttcgggccgcgcagatgaatggcctctccctcctgtgcggcaatctgcacctcgtcattgatggagacctggtgctcaacgatcacatcgccgatgatgactgtccgcccctggatcagcacatcgtcgtcgagcagaatcggaccacctcgcagctgcgcctcgccgccgaccatcgcccgatgcttcagcaggcagttgccttcaatcaccgcattctctgccacctgcgaactgtagcgtacggtgggaatggcatcctctccgcgaccggcgatcaggcgcgcgtgcccgtatacccgggcgttatcgcatacccagacgtcgttttcttcgttcccttcaagtcttgcctggtcaaacacttccgcccgatgttcgacaaacgcatgctcaacgaaggcatcgccgtagatttgcgcctggtggagaatgcgcgaggcgctgacggtggctctctgatagatctgcaggactttgtcgcgatcggcggttaacccgcgcgcggcaatcacctggcagtgggggagaagacgcgcctcgtcggcaaggcgacaataaccgcgcacctggctctgcataaccgtgacgttgtcactgatctgcgcgtgatggctgatctgcgaggcgtgaatgcaggcccgtccgccgatggtggcctcatggctgaccacgcagaacccggttaagcgggcgtcgtcacggatgcgcgccccggcgaagaccacgctgttgatatcgtagatccagcactccccctgctggctgagagcgcattcctcatccacccagccgccttcgctgcccgctttaacgtcagcgaaatcaataagcgccactatctggcgcagggtgacgctttgtttgccatgctcttcctcataacaatactgccgggtctgttcgctgagacggtatttacgcatggccgatccttattacttatggttaacataaacatagcaaagatcgccatagcgcgcgggataaggttcctttagaatgcaacttcaaattaaattgatatcatcaataaaatgaataaaacgcaaacgccgcggcaggtgctaaacctgccggcgggttattttggcatggtgctcggcaccatcggaatgggcttcgcctggcgttacgccagcaccctctggccggtcagccgcagcattggtgatgggctggtgacgctggcgatggcgatgtgggtcctgctcagcatggcgtttatcagccgggcgatccgctttccggcgagcgtgctgcgggagatgcgtcatccggtgagcagcagcttcgtcagcctgtttccggccaccacgctgttggtggcgattggtttggctccctggtgccggccgctggcgatcgggctgtttgtgccgggcgtggcgctgcagctcgcctatgccgcctggcaaagcggtgggctatggcgggggaaccatcctcgcgaggccaccacgccggggttgtatctgccgacagtagccaataattttatcagcgcgatggcctgcggcgcgctgggattttccgatgccggactggtgttcctcggcgccggggtcttctcctggctgagcctcgagccggcgatcctccagcgtctgcgcagcgcaggcgagctgccgacgccgctgcgcacctcgctggggatccagctggcgcctgcgctggtggcctgcagcgcctggctcagcgtcaacggcggggaggccgataccttcgctaagctgctgtttggttacggcctgctgcagctactgtttatgctccgtctgatgccctggtatcttcgtcagccgttcaatgcttctttctggagcttttcgttcggcatttccgcgctggccaccaccggtctgaatctcggccaggccaggggagacggcttttttcatcatctggcgatgccgctatttatttttagcaatctggttgtcggcctgctgctgctgcgtacagcgttgctgttggtcagcgggaaactgttgctccaggtcgaccgggaaacactcctgaataagaaggaaggatcatgacaaagcgtgacgcggattattttagtcaaaaatacagcctgacccgcacccattccgaggtgctgcatgccgcgacgattgtgccgccggggcgggcgctggatctgggctgcggcaacgggcgtaacagcctttatctggcggcgaacggcttcgcggtgacggcgtgggataaaaatccgatgagcgtcaacaatctggaaagtattcgcgccgccgagcgactggataatctgcaaacggcggtgaaagacctcaacagcctgagctttgacggcgagtatgacctgatcctctccaccgtagtgatgatgttcctcgagcctgacaccatcccgggcctgatcgccaatatgcagcgctgcaccgccgccggcggctataacctgattgtggcggcgatggataccgaagactatccctgcaccgtcggcttcccgtttgcctttaaacctaatgagcttcgtgattattaccagggctgggagctgctgaaatacaatgaggacgtcggcgagctgcatcgcaccgacgccaacggcaatcgcatcaaattgcgcttcgccaccctgttggcgcgcaagcctgcctgattcgccgcggcgtgggaagctgagcatggcccgcgccgcattccccgccagagcctgggcaagacagagacccgttgcggcgaaaatgagcctggaaaaccgcgcgataccccttttaagtgattatttattaacgtaatgttcaggccatcaatatttataaatcttccttgacgaagccctttttttgtcacaaaactagtgggtcctatttgctataacgtctgccgaaaaaaaactgcatttacagggatctctctatgcgtactcgcgttttactgaaagtcgccgctctggcgggaatattggcgttgaccggctgtgcggcgaaagtggcgcaaccggatcagtattcgggcttcttaaaagattattccagtttgaaagaaacgacctctgcctccggcaagccggagctgcgctggatcgatccgaacttcaatccggccaactatgacaatattgtttatcacccggtgacctactatccggtaccgaagccgaccacccaggtaggggagaaggcgctgcaggatattcttaactacaccaacaaagagctgaaacaggctatttccgagcgtaaaccgctggccactaccgccggcaagcgcagcctcatcttccgcggggcgatcaccggggtggactccagcaaagaggggctgcagttctatgaagtgatcccggtcgctatgattgtcgccggcacccaggccgccaccggccatcgtaccatggacaccaatctgtactttgaggcggaggtcattgacgccagcaccaataagccggtcatcaaggtcgttcgtaaaggggaaggcaaaaccctggcgaatgagaatacaccgctgaccgtcgataccctgaagcaggttatcgatgatatggcggtcgacgccgttaaattcgatccctctcagcgttaatcgtgccagcgccgtctgacgacggcgctgtttttcttcagcctcctcaggccagccttcggcgcagcaatagctgttccggtttggcaaacatcaccaggttacccagcaggatcagcgccagcccgatcacggcgctgctgtgccagacatacccttcataaacggtggaaatggataaggcgaccagcggaaacagcagcgtactgtaggcggctttgctggcgccgatgcgcccaacgagagtgaaataggcgccaaaggcgatgaccgagccgaacagcgccaggtaaagcagggcgcccagatagctgacggtccattctggcataaaattatcgccgcgcagcagagcgatcgcccccatcaccagcgtgccgtagagcatcgcccagctgttggtggtcagcgtttccagcccgcggcgctggtggcgaatactgaacatattgccgagcgaaaaaccgtaggtacccagggcgctcagcccgatcccccacagcagcgaggcgttcagtccgttggccagcaggtcatcccagaacaggatgacgataccggcgagacccagcgcggcggcggcccagaagcggcccggcggctgctggcggaaaaagagaaagctgttgatggcgttaaacagtaccgccatcgaaaagatcaccgattccagaccggtattgatccaggcggcggcggtataaaaacaccagaaattaaagcagaagacgcagcagccctgcagcaggcagcagagatgatctttcgcgcccagcggccgcaggcgtcgtgtgacgagcagaatcgccagcatcgtgacgctggctacggcgaaacgccagaaaatcgataccggcgcggccaccggtccctgttgtaaaaaaatcgcgatccacgttgtaccccagatcacgacaacgagtgcatagagtaatgcgttcaccctggttctcctctacctgttgatgggaggagtatgccggctgccgcctgctgcggctttcaccggtttgttgtcggcttgcaaattcttgcgcttatttgctatccgctggcggtgaggactggaaaccgcgccgtagtctccctagactagggcttttacagacaatgtgtgaagacgatgggttacgggacatttgaaacattacggcgacagaacgcggtgctgaagggaaccgtggagctgaattccggtattcaactggccgcctggtataacaattgcgataccgtgacggtgcgcagcgaccatcataccttaagtctgtacgtggctgatggctacgaaagctatcaaaagacgccgcacggctggaaaaatggcggcggcccggaccgtttttgtctgatgccgaaaggcgatgaaagcgtatgggatatccgcggcgatctgtcgtttgtgcatctttactgtaccgatgcgcacctgcgtcgcgtcggcgaggaggtgtgggaccgcagcccggcgaacttcaccctgcaggaaaagaccttcgccagcgatgataaaatcaccgcagtgtatcgtcagtttttgctggctaacgactggcggcagccggcgaaccagctgaccctcagcgctgccagcagcttactgcttacccatctgatccagcactattccaccgtgcagtggcgtttgccgacggtcaccggcgggctggcgccaggcgtaaagcgtcacgtactggcctggatcgatgctcatctcgatcagcccttgaccctggccgacctggcgcagcaggcgggtctgagtgagtttcattttgctcgtatgtttcgtcagtcgctaaatatggctccgcatcagtacgtcatgcagcagcgaatggcgaaggcgcaaaacctgatctgccatagcgcgctgccgttaaccgagatagcgctggcctgtggttttagctcccccagccatttcagccatcgggtcaaagccgccaccggcctgacgccctcccagctacgggcggcgcagcgcggatagcacgccgtaactcaccccgccgagcaccacgccccagaaggcggagccaattcccgccagcgtcaccccgctggcggtgaccaggaaggttagcactgccgcatcgcgctcactggcctgatgcactgcctgaaacagactcccgccgatggtgccgagcagcgccagacccgccagcatctggatccacgccggcggcagggccgacatcagggcggtgattgacccgccgaacagaccggccagcagataaaaaccgcccgcggctatggccgccagccagcgctggttcggatccgggtgcgcctccgggctctggcatatggcggcggtgatcgccgcgatgcagatggaataaaccccaaacggcgccagcagtagtgccaaccccccgcaaacgacgatcagtgcggagaccggtacggtatagcctgatgcctgcagggtggcgaaccccggagcgttctgcgaggccatggtgacgaggaagaacggcagaccgacgctgagcaaaagcgccggagtaaactgcggggcgacccattccggcgtcacaaatgccagcggcacggcggcgctagccacatccccggacgccgccgcaatcagcgctccaatcaccagcgcggccaccacggcgaagcggggccacagcgctttacacagcagccaggcggcgagcatcccgccgcacagcggcagatgatcctgtaagccggcgaaggcctgcaaaccaaaccgtagcaggatcccagccagcatcgcggcggccagcgaatggggaatgatctgcatcagccgggcaaacaggccggtggcgccgcagataacgatcagcgcgttggcgaaaataaagatccccacggcctcggcgagggtcaccccctgcaggccgctaactaacagcgcagcgcccggcgttgaccaggcggtgagcacaggaactttccgccaggcgctcagcgcgagagtactgatgcccatggcgaggccaagagccgtcatccagccggcgatctgcccgggggtagcgccggccgcggcggcggcctgccagatgatggcggcggagctggcgtaccccaccaacacggcgacgaagccagcgaacagagtgggaagcggaagactaaacgagcgcatcgatgattctcatgtgcgttataacatccattcactgtatcattgtgcgttataacgcacaagcggtggttcgcgcagctaccctgggagaaaaactcgccgccagtggcgtacgatgccgttaaacgtcctgaaaaaatcagacaaatggcggtatactttgcgcagtaaaaacaggaggaaggatgaatattgcgcaacatctggcggcaacgcttaaaaccctgcgccagcagcgaggctggagcctgtcgcgactggcggaagagaccggggtgtcgaaagccatgctcgggcagattgagcggaatgaatcaagtccaacggtggcgacgctgtggaagattgccaccgggctgaacgtaccgttttcggcgttcatcgtcccggacgccagcgccgcgccctccgcgtttgatccgctgcagcaggcgatggtggtgacgccagtattcccgtgggatcccgagctgcgctttgaccatttttcgataacccttgcccccggcgcgctgagcgaatcaacgccgcatgagaaaggggtgattgagcatgtggtagtgataagtggtacgctggatttgtgcttacaaggggagtggcactcgctgcaggcgggtgagggtaggcgtttcgccggcgacgcgacgcatgcgtatcgtaaccgcggcgcccaggcggcccatttccattctcttatccattatccaaaagaaaaaaccgcgagcgaacccgcggccagacaagatgactgatgataaccactcacaacgtgacgaggaaaatccggaatacgtgatgacagtactcttcgccgtgatttgagggaaatatcttttccgtcaatactttgttgaaaagtgaaaattcgtcgtcgcgcgacggcggaaaaggttttcgtctgcgcccggttctgactacaatagccgccatttcgacccccttatactggataacaacacgcgtatgcgcctgcacaatcatcgtcttgaacttcttagtcctgcccgcgacgccggtatcgctcgcgaagcgatccttcacggcgccgatgccgtttacatcggtggacctggctttggcgcccgccacaacgccagcaacagtctgagcgatatcgccgggctggtgcctttcgctcatcgctttggcgcaaaggtatttgtgacgctgaacaccattctgcatgacgatgaactggagccggcgcagcggctgattaccgatctctacgacgcaggcgtcgatgcgctgatcgtgcaggatatggggatcatggagctggatctgccgccgattgagctgcacgccagcacccagtgcgatattcgcagtgtggaaaaagcgaagtttctctccgacgccggcttcagtcagatcgtgctggcgcgcgaactgaacctcagtcaaatcaaagccatttacgaccacactgacgccactatcgaattctttatccatggcgcgctgtgcgtggcctattccgggcagtgttacatttcgcacgcccagaccggacgcagcgccaaccgcggcgactgctcgcaggcttgccgcttgccgtataccctgaaggacgatcaggggcgggtggtggcctatgagaaacatctcctgtcgatgaaggataacgatcagaccgccaacctggcggcgctgatcgacgctggcgtacgctccttcaaaattgaaggtcgttacaaagacatgagttatgtgaaaaacatcactgcgcactaccgtcaaatgctggatgccattatcgaagatcgcggcgacctggcgcgcgcctcggctggacgcaccgagcatttctttatcccgtccacggataaaaccttccaccggggcagcactgactactttgttaatgcccgcaaaggcgatatcggcgcctttgattcgccgaaatttatcggcctgccggtgggtgaagttctgaaggtaggcaaagaccacctcgacgttgaagtcagtgaaccgttaaccaacggcgatggtctcaacgtgatgattaagcgcgaagtggtgggcttccgtgctaataccgtggaaaaaaccggcgaaaaccgttatcgggtatggccgaacgagatgccagcggatctgcataaagtgcgcccccatcagccgctcaaccgcaacctcgatcataactggcaacaggcgctgctaaagacctccagcgaacgccgcatcgcggtagacgtgacgttgagcggctggcaggagcagctggttctcaccatgacctgtgaagatggcgtcagcgtgacccacacccttgacggggagttcgccgaagctaaccaggcggagaaagcgttggccaacctgcgtgacggtgtcacaaaactggggcaaaccatctactatgcgcgcgaggtgcaggttaatctgccgccgctgtttgtgcccaacagcctgctcaaccagctgcgtcgggaaactgcggagatgctggatgaagcgcgcctcaacgcctggcagcgtggcacccgcaagccggtctccgtaccgccgccggtctacccggagacccatctctccttcctcgccaacgtctataaccacaaggcgcgggcgttctaccagcgctatggcgtacagctgatcgacgccgcctatgaagcgcacgaagagaagggcgatgtgccggtgatgatcactaagcattgtctgcggttcgccttcaacctctgcccgaagcaggcgaaaggctccatcaagagctggaaagccacgccgatgcagctgatccatggcgatgaggtcctgaccctgaagtttgactgccgtccgtgcgaaatgcacgtggtcggcaagatcaaaaaccatatcctcaaaatgccgcacccgggcagcattgtggcctccgtcagcccggacgatctgatgaagacgctgccgaagcgcaaaggggcctgattcgagtcgatgctattggcaggatgcccgcggtttacggtcgtcctgccagcggtgatgttcgcgcaggtctgcggcggcctcctcgtgctggctgcgaagctcatcgctatccgcttcgtgcagcagctgctgttcgagactttgcaccggaaagtactcgtgtccctgacgatgggccaacagatgcccggaaaataatgcgcacagcaacagcagggcgcttatgcttctctttaacataccttttctcgacggaacaatggcgtggacatactatgtcaggcgcaatgcaggctttttttcgggcatctcaaagaacggcaagagtttgtcaacgatggctgacgaaggatgaaaaaaggcctgacgcggaagccaggccagagtgttacgctttcggcggcagcggtttcccgctgtgctcgctcccttttggcggctgcttgccgttgtgctgcggctgtttaccgttgtgctgcggctgtttaccgtcgtgctgcggctgtttgccgtcgtgctgcggctgtttgccgtctcgttgtggctgtttgctgttgtattgcgcttgcttaccttcgtgttggccgtttttcaccggcggtttaccctgatgctgcgcgcctttttccggcggcggcggcgggttgtcggcagcgaaagcccatgacgacattcccagcgtcattatggcggagagtaaagctaacttcttcatagcaatatcctttcttcagatgtatcgccgtatttcatcaggcaaaagtgaagataagatggagaagtcccttttcggacctctctgcatccaccctcagacttttagccctgcggcggtcatcagcaggcgaaacagcaggcttatggcggccagcgtcagtacgctacctccccagagcgcgatcagccacagcagacgtttaggccaggcagtacgcatcagtgatatccctccccaggctgaactttgccgcggaacacgtaatagctccagcaggtgtagccaagaatgaccggaataatcagcagggcgcccaccagcataaagccctggctttgcgggggagcggcagcctgccacaatgtgatggccggcgggataatatgcggccagatgctgatccctagtccgctgaagccgagaaagaccaggcccagcgtcagcgtgaagggcgaaacatggcggtcgcgctgatgcagcgtgcgccacagccagccgctaacgaggatcaccagcagcggtaccggcagcaggaaatagagattcggcaggctgaaccagcgggcagcaatcgccgggtgcgccagcggagtccacaggctgatgacggcaaacaccgccagcagggcacccagcaactgccgcgatgcgctgcgcattctctgctgcagcacaccttcacttttcatcaccagccaggtggcgccgagcagcgcataggtcacgcatagtccgaatccgcagaacaggctgaacggggtcagccagtcaaacatgccgccgctgaaggcgcgaccgctgacggtgaaaccgttgatcaccgccccgaccaccacgccctggctgaaggttgccagcagggagccgccaaaaaaggcgcgatcccagaatggccggtgcgacggtgtggcctggaagcgaaactcaaaggcgacgccgcgaaaaatcaggccgatcagcatcagggtcagggggatcgacagggcgtcgatgatcaccgcgtaggcgaggggaaaggcgccaaacaggccggcgccgccgagcaccagccaggtttcattgccatcccataccggcgcgacgctgttgaccattacgtcgcgatccccgccgccccgcaccgtgctgaacagcaggccgatgcccagatcaaagccatccatgacgatgtacatcagcgtggcaaagacgataatcacgaaccagatcaccgataattcgatacccattagcgggactccttctgcagataaccttcagtggcggcggacagcgggcgggctggcgtaccggttgtcgccgggagcatctcctgcggccccttgcggatcaggcgcagcatatagctgtagccgacgccgaagacggcgctgtacactacgataaaggtcaataaactgaccgacatatgcagatcgccatgagcggaaacggcatcggcggtgcgctgaacgccatacaccacccagggttggcggcccacctcggtggtcacccagccggcgagaatagcgatcaggccggatggccccatccacagggcaaaacgcagaaacggccgcgagtggtatagccggtcgccgcgacgcagccacagggccagcacgcccagcagcagcatcaacatgcctagcccggccatcaggcgaaatgaccagaacaccacagtagaattcgggcgctcctcaggagcgaactctttcaacgccggcacctgtttatcaagactgtgggtgaggatcagactgcccagggccgggatctcaagcccgtagcgggtgcgctcctggtccatatcgggccagccaaacagcagcaacggcgttggctcacccggtggattttcccagtgcccctcaatggcggcgattttcgccggctggtgcttcagggtattcaggccatgcatatcgccgatcagcgcctggacgggggcgaccagcagcgtcatccatagcgccatcgagaacatcttacggatcgccggcgactgattgccgcgcagcagatgccaggccgccgaggcgccgacaaacagcgcgctactgagaaacgccgctactgtcatatgcaataatcggtaggggaacgacggattaaagatcaccgccagccagtcgacgggcacgacctggccatcaacgatctcaaacccctgcggggtctgcatccagctgttagaggcgaggatccagaaggtggagatgatagtacccagcgccaccatgcaggtggcgaaaaagtgtagccccggccccacgcggttccagccgaaaagcatcaccccgaggaagcccgcttccagaaaaaatgccgtcaggacttcataggtcagcagagggccggttatgctgcctgcaaactgtgagaaaccgctccagttggtgccgaactggtaggccatcaccagcccggaaacgacccccataccgaagttgacggcgaaaatcttcgaccagaaatggtacagcgagcgccagacgggattttttgtttttagccataagccttcgagcaccgccagatagctggccagtccgatggtaatggcggggaagataatatgaaatgagaccgtaaaagcgaattgaactcgcgccagatggaatgcatcaagaccgaacatgcaggactccacaacaaaattgattcagcgcaattttaggtggggtgacgactgaggggcagaggcagtcacgccattttttatcataacagttggccgctgttatgatttttcagctgttgccagggcgagaaaatatccttgcgcaaccttgattaatccctgcggaaggtgattaggcgtctattccgctgtctgtcatattattgctaacggctggctacgcggccctgccgccggtatggcgtagtcacctggtcggcataatatatccttaccacccgccgtagctcatattttggcttacgaaatccgccacggatttttactctgatttattgtcactcattagtatgagaataagtaaaaacgctgagccggttaatcgtaaattaaataataataaattgtcggctccgcggctaatttgtactgtatgagctcgggaataaataaaagggaatgccaatgtctgaaaaaggattacagagtctgtgcattacgcttggcgtaatgattatcttctggtttgttttaatctcgctattctgggtggtgatattttaaacccatcccgtgctatcacggcgacgcggccgccgctgcagatataacagttacaggaaactatgatttttttataactgatatatgataatgggacgttatcgtacggggacggccgcaatgaaaaagtatcaacagttggcgcagcaactgaccgagcagatcgcccttggcgtctggttgcctggcgatcggctgccgtcgctgcgcgagcaggtgatcagcagcggcatgagctttatgaccgtcagccatgcctatcagctgctggaaagccaggggcgcatcgtcgcccgtccgcagtcgggttattatgttgccccccagccggtgaagctccgccagccggcgccgcctgcccaggtcactcgcgatgaagccgtcgatatcaatacctatatctttgaggtgctccaggccagccgccaggcgtcgatgctgccctttgcctcggcctttccggacccgcgtctcttcccgctgcagcagctcaaccgctcgctggcgcaggtgagtaaaaccgccaccgccatgagcgtcattgagaatctgccgccgggcaatgcagaactccggcatgccattgcccgtcgctatgccctgcaggggatgaacgtctcgccggacgagatcgtcatcaccgccggggcgctggaggcgcttaacctcagcctgcaggcggtgaccgagccgggagactgggtggtggtggaaaacccctgcttctacggcgccctgcaggcgctggagaggctgcgtttgaaagcattgtcggtggccactgacgtcagggaaggcattgatctgacggcgctggaggcggccctgcaaaactatccggtgaaggcctgctggctgatgaccaacggccagaatccgctcggcttcaccctcagcgctgaaaaaaaagcggcgctggtggcgctgctggcgcgctataacgtgatgttgatcgaagatgatgtctacagcgagctctattttggccgcgaaaagccgttaccggcgaagttctgggatcgccaggagatgacgctgcactgcagctcgttctcaaaatgtctggtacccggctttcgtatcggctgggtggcggccggcaaacaggcgcggcggatccagcagctccagctgatgagtacgctttccaccagttcgccgatgcagttagccctggtggattacctgtccaccaagcgctatgacgcccacctgcgccgtctacgtcgtcagctggcggagcgtaaacagcaggcctggcaggcgctgctgcgccatctgccgccggaggtcgtcgtccatcacagcgacagcggctactttctgtggatcgaactaccggaaggggccgacgctagcgcacttagcgcccgggcgctggcgtcgcacatcagtattgccccagggaaaatgttctccacctccgacagctggacctcgtttttccgttttaataccgcctggggctggggggaacgcgaagagcagggggtgaagcgcctgggggagcttattcgcgaacagcttgcctgaccctgtcgtttatttttctcatcataaacattctgcgaaaataagcgaaagaggatttttatcgaggccggtcattattttaccggcgctcaccataggaaatatgcatacccctcctcattccctaactcgttgtctataatccataaagtcctgcttgtgttggcgatttttacgtaatgcgtcccgggtcacaacctgaataaattcccctgggggcgttaatccgctgactacccttatttcaggagatatttttacggcacggctgccgctaattcctttgtgacaggagtaacacctgatgagcaaaaaaattgcccgttgcagcctttatgtgctgggtatggcttgtttgaccgttcaggcggcagagccgctcacctcgctggataaaccggaagggcggctcgatattattgcctggccgggatatatcgaacgcggtcagaccgacaaacagtacgactgggtgagtcagttcgaaaaggacaccggttgccaggttaatgtcaaaaccgctgccacctctgacgagatggtcagtctgatggccaaaggcggctacgatctggtcaccgcctcgggtgatgcttcgctgcgcctgatcatgggcaaacgcgtgcagccgatcaacacggcgctgattgccggctggggctcccttgatccgcgtattgcgaagggggcgtggtttaacgtcggcggtaaagtctatggcacgccgtatcagtgggggccgaacctgctgatgtacaacacccgcgtattcccgacgccgccggacagctggcgcgtggtgttcgtcaagcaggatctaccggatggtaaaaccaaccaggggcgggtgcaggcctatgatggcccgatctatatcgccgacgccgcgctgtttgtcaaagccacccagccgcagctggggatcgaagacccctatcaactgaccgaaacccagtacaacgcggtgctgaaagtcctgcgcgaccagcaaccgctgatccatcgctactggcatgacgccaccgtacagatgaacgacttcaaaaacgaaggggtagccgcctccagttcgtggccctatcaagccaacggcctgaaggcggaaggccagccggtcgccaccgtgttcccgaaggagggggtaaccggctgggcggataccaccatgctgcacagcgaggcgaagcacccggtctgcgcctataaatggatgaactggtcgctcacgccgaaggtgcagggcgatgtggcggcctggttcggttcgctgccggtggtgcctgagggctgtaaagccagcgcgctgctcggtgataaaggctgtgagaccaacggctatgagcagtttaaccgcattcacttctggaaaacgccggttgcggaaggcgggaaatacgtgccctatagccgctggactcaggactatattgcgataatgggcggccgctaaggatcggaggcaaacaatgacgtacgcggtcgagttccagaatgtatcgcgcctgtatggcgatgtgcgggcggtggatggggttagcattggcatacgcgatggagagtttttctcgatgctgggtccgtccggctcgggtaaaaccacctgcctgcggctgattgccggttttgagcagctctccggcggaaccatccatatctttggtcagccggccagcgaactgccgccctggcagcgggatgtgaataccgtgttccaggactacgcgctatttccccacatgtcgatccttgacaacgtcgcttacggcctgatggtcaaaggcatggcgaagaaagcgcgccatgcccgcgcccaggaggcgctggagaaggtggcccttggctttgctcatcatcgcaagccctcccagctctccggcggccagcggcagcgggtcgcgattgcccgggcgctggtgaaccagccgcgggtgctgctgctcgatgagccgctgggcgccctggatttgaaactacgcgagcagatgcaggtggagctgaaaaagctgcagcagtcgctggggatcaccttcatcttcgtgacccacgaccagagcgaagcgctgtcgatgtcggatcgcgtggcggtgtttaacaacgggcgcattgagcaggtggatgccccgcaggatctctatctgcaccccaggaccgcgtttgtggccggttttgtcggcaccgccaacgtttttgcagccgaggcggcccgacgattgtgcgggatggcgggcagctggtcgctgcgtccggagcatgttcgcctgcagggcggcggcgaggtgcaggtgcagggtgtggtgcaggcggtgcagtatcagggggcggcgacgcggatcgagctccgcctcgcggatggcgacaaactgctggtcagccaggccaacatcgatggcgcggcggcggccagcgttccgcgaaccgggcaaatagtacaggcgtcatggtcgcgctcggcgatgaccccgctggaaagcggaggctgagatgaccatggcaataattcctgcgcagaccgggcgcatatcggggatcttctggcgccgaccggcgctgggcctgtttttactgctgctcgggccgctgatgtggtttggcatcgtctatctgggatcgctgctgaccctgctgtggcagagcatttatacctttgacgacttcaccatgtcggtgaccagcgacttcacgctggctaacctgcgggcgctgttcaaccctgccaactacgatattattgtgcggaccctggtgatggcgctgtgcgtcacgctggccagcgcgctgctggcgctgccgatggcctggtatatggcgcgctataccagcggcaaaatgaaggccttcttttatatcgcggtcatgctaccaatgtgggccagctatatcgtcaaagcctatgcgtgggtgctgctgctggcgaaagatggcgtggcgcagtggttcctcggtcatcttggactggagggggcgctgaacgcgctgttgagcgtcccggcggtcggcggcaataccttgtccacctccggccttggacgctttctggtgttcgtctacatctggctgccgtttatgatcctgccggtgcaggcggcgctggagcgtattccgggatcgttgctacaggcctcggccgatctcggcgcggacccgcggcagacctttcgctacgtggtgctgccgctggccattcccggcatcgccgctgggtcgatcttcaccttttcgctgacgctaggcgactttatcgtgccgcagctggtgggcccgccgggatactttatcggcaatatggtttactcgcagcagggggcgatcggcaatatgccgatggcggcggcgtttaccctggtgcctatcgtcttgattgccctctatctggcgttcgtgaaacgtctgggagccttcgatgcactctgaacgcgcgccctggtatctgcgactggcgacctggggcggggtgatattcctccactttccgctgctgattatcgccatctatgcttttaatacggaagatgcagcctttagctttccgccgcaggggctgacgctgcgctggttcagcgaggcggccgggcgcagcgacattctgcaggcagtgacactgtcacttaagatcgccgccctgtcgaccgccattgccttagtgcttggcacgctggctgcaggagccctgtggcgcagcgccttttttggcaaaaacgcggtgtcgctactgctgctgctgcctatcgccctgccggggatcattaccggcctggcactcctgacggcgttcaaagcggtcggccttgagcctggcctgctgacgatcgtggtggggcacgcgaccttctgcgtggtggtggtgtttaacaacgtcatcgcccgtttccgccggacttcgtggagtatggtggaagcctcgatggatttaggcgctaccggttggcagacctttcgttacgtagtgctgcccaatctggggtcggcgctgctggcggggggaatgctggcattcgctctgtcgtttgatgaaattatcgttaccacttttaccgcggggcatgaacgcaccttgccgctgtggttgctgaatcagctggggcggccgcgagatgtgcccgtcaccaacgttgtcgcgctgttggtgatgctggtaacgacgataccaatcttaggggcctggtggctcacccgcgacggcgataacgacgccggaaacgggaaataaaaccatgaaacaggataatgctatgcaacacaacctattgataaacggtaagttagtggcaggtgaaggcgagaaggttccggtatataaccctgcaaccggcgaagtgatcctggagattgccgaagcgacagcggcccaggtcgatgccgccgttgaggcggcggaccgggcattcgatgcctggagtcagacgacgccgaagacgcgtgcggaatgtctcctgaagctggcggacgccatctcggcgcaggctgaaaccctggcgcagctggagtcgctgaactgcggcaagccgctgcactgcgtgattaatgatgaaatgccggccatcgccgacgtcttccgcttcttcgccggcgccgctcgctgcctgccggggatggcggccggagagtatctcgaagggcatacctcaatgatccgccgcgatccggtgggcgtggtggcctccatcgcgccgtggaactatccgctgatgatggcggcctggaagctggccccggcgctggcggcgggcaactgcgtagtgataaaaccctcggagatcaccccgctgacggcgctgaagctggcggagctggcaaaagatatcttcccggagggggttatcaacgtgctgtttggccgcggtaaaacggtgggcgaccccttgaccgcccacgttaaagtgcgaatggtctccctgaccggatcgattgccaccggagcccatatcattggccataccgcctcgtcgattaaacgcacccacatggagctgggcggtaaggcgccagtgatcgtttttgacgatgcggacatcgatgcggtggtggatggggtgcggaccttcggtttttacaacgccggccaggactgcacggccgcctgccggatctacgcccagcagggtatctatgaccagctggtggagaaacttggggcggcggtggccagcctgaaaatgggggcgccggaggacgctgccaccgaactgggtccgctgagctcgctggcccatcttgagcgcgttagcgcggcggtggaagccgcaagggcgctgccgcacattaaagtggtcaccggcggcagtcgggctgacggcgcgggctattacttccagccgacgctgctcgccggcgcccggcaggaagacgctattgtccagcgcgaagtgtttggtccggtagtcagcgtgacgcctttcagcgatgaagcgcaggccctgagctgggcgaatgactctcagtatggcctggcctcctcggtatggacgaaagatgtcggtcgcgcccatcgtcttagcgccaggctgcagtacggctgcacctgggtcaatacccactttatgctggtcagcgaaatgccgcacggtggccagaagctgtcaggctacggcaaggacatgtcgatgtatggccttgaggattataccgtggtccgccatgtgatggttaagcatagctaaaggattgaccatttagcgccaggcgactattgcgcgatgggtgtgttaggccgctaatagtcacaatggcaaaaattgtcaaaactcaacccaggggatatgagattattctgatgccccttcaagagctaagccatcatgagtgccggagataagcgccggatggggtccgccagtcaccctgggcgcacagcgcccggcgggtggggcggcaacatcgcggttcgcgaccgaattgcggcccctgtctgtcggcaggggcttttttgtgctcgcagaagagcgaagagatgagccggccagtcgcgccgggataacgagaataccgctttaactactttcagcgcttggtttttttgctgggcaggctggcgctgcgccggtcacgaatgtaggaaataagattatacaccgccgcgaccagcaggattagcgcgatgaccagcgtgatgattccggacatatccacctcgaaattcacagcgcgaactgcgctaaagcattaccaatggttatgaatgtaagtattatctgacgcgaaggcaaatgatatttgttgtcatttagcgctatttctggctcttatccgtgatgacggagatgaagaggttatgttacaacggcttgccatcgccatttatcttcttacgatgacggcccgcgcgatatattgcgcctgtggcgaaggcggcgatccttttccccttgccgacggcgaaatattttccttattagcgaaattaactcccctgaacagaaagtatttcacggctagagataagcttttaatatttacggttatcgcatgatatttgttctgaatattttatagccctgaggcagaggcaaataccggatgccgcccggtagcgcgccccgggtttgactttccgccgccgctcatgcgatcatttagggcatattaggttttgacgttgatgtcgctgtgaaaatttttgcttttattctgctggctatcggcgctgtggcgctgagctatggtaatgccccggcgaaacgaatccaaagctgtgagaagatgggcgtagggcaggccgtctgcgccgccgccgaatgggatagtgaaaaagtcagtgtactgccgcgctataaccccagtcttaataaggtaatagctgccgcgcagttagcccccgccgcccgacagcaagataacaactctgttgttcgcgcgtaaaaaagcagccttcggggctgcttttttaggtttcgttgctgaattaaatgattaaaaccagccaaatcttacggacagcaggctgataagcgcgaacgcggcgcagacattaatcataacgacggttttactggagacatccatagcgccaccctaatgagtaagtcctaaaggtatagtacggcgccagcggttgcgctatcagattaagacgaatcaggctttattctgaatattcagcccgtttctgattttgttatacaggtatctctgaatcacgacgtcatggcagataatcatcccaccatggaacgcccctcagggaaggaaaaagtaagaatgacgttatatcaaaaaatgttggtgttttacgccattatgggcgtgatatgcgccgtgattagctggtttttaaccaaagagagccggatgatccgcctgctggcggccctgctgatcggcgccacctggccgttcagcttcccgatggcgctgctcgtctcgctgttttaaccctcaggcgctagacggcagaaaagggtagcacaaaggataaggttactgtataaaaaaccagtaaccttatcatggaggcatacaggtgaacggtttttattcgtccgtcgctggcgccacgctgcgctggcacgatttcccgggagatggccttccggtggtgtttatccacggccttggctgcgcgtcatcctacgattatccccgcattgccagcgatcccgcgctccgcgaacggcgcaaaatactcatcgatctgccgggcttcggctatagcgataaaccgcgcgtgtttagttacaacatacatgagcaggctttagttttggagcagttcctcagccacctgcgcctgcagcgcttcgcgctgttcgggcatagcatgggagggagcatcgccatcgaagcggcggggctactgggcgagcgggtgaccacgctgctggtctcggaacccaacctgttcgccggcggcggcgagtacagcaggcgcattgcggcgcagtcagagacagcctttgtcgctgacggctatgccaggctgctggcggaggagcgctcgccgtgggcgggttgtttacaaaactgcgccccctgggccgtctggcgggccgccagcagcctgatatgcggcagcgacacgccctggtttacccagctatgccagctgcgctgccagaaaatgctgatcgtcggagagcggtcgctcccttatgcggatagcgacctcgttcaggcacaagggatcccggtcggcatcgtgccccatgccggacactcgatggcgtgggaaaacccgcaggggctggcgcagcttatcgccagccatagttaagaggcgctgggcctcagaagggaagctcgcggggctgggtctggatcgttatccagcgcagctcggtgaattccgcgatcccggcccggccgccaaagcggccatagccggaggctttgcagccgccaaacggcatttgcgcctcatcatgcaccgttgggccattgatatggcaaatcccggtatgcagacgttgcgctacgttccacgctctggcgctgtcgcggctgtagaccgcagcggaaagaccatactcgctgtcgttggccaccgccagcgcctcctcttcgctatgaacgcgaataatcgctttcaccgggccgaaggactcttcacgccacagccgcatctcgcgggtcacgccgtccagcagggtcgggctcatatgggtatcgttggctttaccaccggtcagcaggcgagcgcctttcgctaacgcatcgtcaatgagcgcgttgcagcgggcgatggtgttcatatcgacaaccgggcccgtgagggcggcaggcagggcggcggcgcgcctggccagcagcgggataaacgcctccgctacggcattgtcgacaataatgcgctcggtggacatgcagatctgcccggcgttggcgaaggcgccaaaaacagcgcccgccgccgcttgctcaatatcagcatcgtccagcaccagcaggggcgcttttccaccgagctcgagcaccgctggtttcagatactgtccgcaggtgcgggcgataatgcgccccaccggtgtggagccggtaaagttaacgcgccgcaccgccgggtgggcgatcagcgattccaccagcgccggcgcatcttcaggcgcacaggtaagatagttcaccacgcccggcgggaagcccgccgcgtcaagggcgtcgataatcagtccctgagcggcgggggaaagttcggcgcccttaaggatcaccgtgttgccacaggccagcggcgtcgccagggcccgggtggccagaatcagcggcgcgttccacggcgccatgcccagcaccactcccgccccctggcggacgcccatcgccaggttacccggcacgttggacggaattatttgcccttcaatctgggtggtcagcgccgccgcttcacgcagaatatctgccgccagatgaacgttaaatccggcccagtgcgcggtcgcgccggtctccgccgccatggcggcgataaatttcgcctcccgcaacagcatctgttccgccgcctcgagcagtaagcgacgtcgttccgccggcgcagtatcgcgccacagcggaaaggcgcaggccgcggcttcgacgcagcgtttgccgtcggcgaggctggcggcagcggccaccgaggctgcctcatcgtgggccgggtggcgtcgggtaaaggtgcggcggccttcggcatcgtgccactggccgtcaatgtacagattgcaggtgattgtcatggtggaaacctcttgttctgcggttcccccagtgtaccgggcggcactgacgggaagcgtgagccgggcggttatcgcacatttttttgcaggaattttgtgtggctcacaacatcccgaagccctctggcgtaaaaagcagcgcaacgtcgattaaaccagcaaattccacgcgttttgcataaggtgatagccattgattatttgccgccgtcaggcggctgtgctgttattactgttcttataatcaataatcaggacttataaccatgtctacagggaaaaccacgctggcgctgctgctgagcgcactgctgccggccggcgccgcctgggccgcaggcaatgacactctggtctactgctcagaagcctctccggagtccttcaatccgcagatcgccagctccggtccgtcgttcgtcgccagctcgcaggtactgtataaccgtctggtgagctttgacccggtgaaaaatacgccgatcccgtcgctggccaccgagtggcacgtctctgaggatggcaaaacctggacctttacactgcgtcagggggtgaagttcaacagcaacaaattcttcaaaccgacccgcgattttaacgccgacgacgtcctgttctccgtgctgcgccagatggatcctcagcatccttatcacaaggtgtcgcaggggaactatgaatacttccacgacgtgggcctcgataagctgattaaatcggtgaaaaaggtggatgattaccatgtccagttcgagctcaacgagccgaacgcggcgtttcttgccgactggggcatggacttcgcctctattctgtcggcagagtatggtgaggcgatgctgaagaaaggaacgccggaaaacgttgataactggcctgtcggtaccggaccgtatgcgctgcagcagtataaagtggattcgcaaatccgctatattgccaatccccactattgggaaggcgaggtaccgaccaagcacctgatcttctccattacgccgaacgtcgagactcgtctggcgaaactgcagaccaacgagtgccagattattcccgcgccgtcgccggtacagttcccggtgattaagggcaataaagatctggcgctgcatgcggttgaggcgctgaacgtcggctatctggcgtttaacaccgagaaaaaaccgtttgataatgtgctggtgcgccaggcgttaaactacgctaccgacaagcaggcgatcgtcaaggcggtattcctcgattccggcagcgtggcgaaatcaccgatcccgtcgacgatgctcgggtataagaaagatctcccggactatgactacgatccgcagaaagccaaagcgctgctcaagcaggcgggtctggagcaaggcgcggaagtgaccctgtggtcaatgccggtccagcgcccctacaacccaaactcaaaacgcattgccgaaatgatccaaaacgactgggcgaaagtgggggtcaaagccaaaattgtcagctatgaatggggcgaataccttgccggtatgcgtaaaggggagcacgacagcgccctgtatggctggatgtcggacaacggcgatccggacaactttgctggcacattgctcagctgtgataatatccagaccggctccaacgccgcccgctggtgtgacaaatcctatgacgcgctggtaaagaaagcgctgttggtgagcgatccgcaggcgcgggccaaactctacgaacaggcgcaggagatcttttatcagcaggcgccatggatcaccctggcgaccgggaaaaccttctatgcgacgcgcagcaacgtcagcggctacaccgtcagcatgatggggagcgatttttccaaagcgaagctgaattaagcgaaaggagaacaggatggcacatctggatgaggttatcgtcaaagtcgatgacaccctggccgagggcgttatcgcgcatatgaatgagctgctaatcgccctgagtgatgatgcgcaactcagtcgtgaggaacgctatatccaacagcagcgtctgcgcaccgccatcgcccatcatgggcgacagcatcaggaagagcaggacgcgcgccgcgagcagttgaccaaaggcggcgcgatcctctgaagatgcgctcagaactggcgtctggccaccagccaggcgcccaccaccagcatcaccgccccgcataacggtccgatcagcgcccgcaccggcacgccgtgggcgcgaactaaatccataatcaacccgcccaccagctggctggccaccagtaccgcaatggtcgtcgccgcgccaacgttttgataaccgctgatgctggcgaagacgaaaaaggaccccagcaggccggggatcagcgtccaccacttcacgctcagggccagctcctgaaagccggcgacgccctggcgcagcagtaacatcgtcacgaagataacgatcccgaccagcgaattgagcagcatagcgataaggattgtcgacgccgcctgggtgatgcgcaccatcagagtgttctgcactaccaggccaacgccggcggcgatcaggcaggcgagagtgagcgacgcgttcatgctttgccgtccgggtcctgacgcgcatccagctgcagctgcataaaggtcagatccagccagcggccaaatttggtgcccacctgcggcatctgcccggtggtgataaagcccagcgtttcatgcagatgcagcgaagcgtgattctgcgactcgatgccggcgaccatcacatgtttattcagccgtcgcgcttcggcgatcaaggcgaccagcagcttgcggcccagccctttcccctgatgttcgggatgaacgtacaccgaatgctccacggtatggcgaaagccgtcaaacgcccgccagtcgccaaacgaggaataaccggtaatgacgccgtcttcctcgctcaccagtaccggaaatccagccagctggcgggcttcaaaccaggcgatgcggttgtcggtatccacagttttatcattccagatggcggcggtatggacgacggcatggttatagatctcggcgatcgccgcgcagtcgtctttaatggcagggcgaatggacatagcaaacctcaatttttcgtacactatagtagtacaatattattacaataatgaacgccacgctgtcatccgttttcagcataattttaacggctaacccgggaataacgcgtctcggtggatggttgtgtaatgggggggcgcacactatagtgttacgttatgaatactatagaagacaacctcaatcagcgcatcagcgcgcgcatccgcatcgagcgcgagtcccgcggctggtcgctgaacgacctcgccgaacgggccggcgcctcgcgggcgatgatccataaaatcgagcgtggcgaaagcagcccgaccgcctcgatgctgggccgcctttccggcgccttcggcatcagtatgtcgaccctgatcgcccgcgcggaaatgcaggagggcaagctgctgcgctttgccagccagccggtatggcgcgacccgcaaagccactatctccgccgccacgtttcgccgcgcagcgatttgccgatcgatctggtgcagattgagctgccgcccggtagcgatgtgccgatgcccgccgcgtcctatgcgcttgcccgccagctaatctggctgcaacagggcgagctggtgtttgtcgaaggcaatacccgccatgagatgcaggcgggggattgtctggagcttggcccgcccaacgattgtcgctttattaatgaatccgcagagacctgcgtctatctggtggttcgccttaatcaatcgccatccggctcttaatggtaaagcacgttgcgcataaagcagctagcctcagtacagtctgctaacaagaggagtttgctatgacagatcaaccgcaacgccatcgccgctgggtactggcttcccgcccccatggtgaaccgacggcagagaatttccgcctggaagagagcgaagtgccgacgccaggcccgggtcaagtgctgctgcgtaccgtttatttatcgctcgacccgtatatgcgcgggcgcatgagcgacgcgccgtcctattcgccgccggtggccattggcgcggtgatggtgggagggaccgtgagtcgcgtggtcagctcaaatcatgccgattatcaacccggcgactgggtgctgggctacagcggctggcaggattatgaactctccgacggcagcggactggtgaagctgggtgacaatccgcaacacccgtcctggtcgctgggagttctggggatgcccggcttcaccgcctacatgggtttgctggacatcggccagccaaaggcgggcgaaacgctggtggtcgccgcggcgaccgggccggttggcgccacggttggacagatcggcaaaattaagggctgccgcaccgtcggcatcgctggcggcgcggaaaaatgccgctatgcggttgagacgttaggctttgatctctgccttgaccatcgtgcggatgattttgccgaacagctggcccaggcttgcccgcagggtattgacgtttattatgaaaacgtcggcggcaaggtttttgacgcggtgctgccgctgttgaataccgcagcgcgggtacccgtctgcgggctggtgagcggctataacgccaccgggctgccggacgggccagatcgtctgccgctgctgatggcgaccatcctcaaaaagcgcatccggatgcagggctttattatcggccaggattacgggcatcggatcgccgaattccagcagcagatggggcgctgggtgcaggaggggaaaattaaatatcgcgaacagctgatcgacggtctggaccaggcgccgcaggcgctgatcggtctgttaaaaggcgagaacttcggtaaggtagtgatccgcgtcgcggcggacgactagcctggcgggcttcgactgaacaggcccctttttccgccagggaaaaggggcctggcatagaggtcaggcgtagaaggctaaccgctgggcgagcagatcgacaaaggcttcgcggtccacatccagcatcagggtggtattgggccgattaccggtcagatggtagtaatcgaccaccgtcatcccctgggtatatttgccttccgtttctacgccaacccagcgttcgatcgtggtaaagatctccggcttgaggagccaggcgatggtgcagggatcgtgcagcggcgcgccgtcgaagccccacttttcatctttgtggtaggccataaagaagtcgagcagctcggcgacgatggtcgacaccgggttgccaatctggcggaatcgctcgatatcggcgggaaggatttgcgccttatgggtgacgtcaaggcccgccatcaccaccgggatcccggactgaaagaccatttccgcggcctgcggatcaacgtaaatattaaactccgccgccggctgccagttgcccagccccatggcgccccccatgatcacgatgcgggcgatcttcgcgtgcagctccggatggctggcgagcagcaatgccacgttagtttgcggcccggtggccaccagagtcaccggctcctggctttcccgcagcacgctggccatcagctcgacggcggtgaagttctgcggcgcaaaggccggctcaggcaggctcgggccatccagtccgctctcgccgtgcacgttatcggcgatgatcagatcgcgcatcaacggcttccacgcgccgccggcaaccggaatgtccggccggttcagcagcgtcaacatacgcagcacgttgcgcagggtcttctccggggtctggttgcccgcggaagcggtgacggctttcacctccagctccggcgaggcgagggcgaggaccagggcgatcgcgtcatcatgtcccggatcgcaatcaatcattatcggcagtgccatagcagctccttgttggcgatgttctgtgaccagactaacgctgcgagtcgaggcagacgagatggtgtgcagaatagtgtgatggagaccacgattgctgcgagggcaacgcgtatcgttacgcgaccgtccgtaaacatggtgcctcgttttgcggtggcgcaagatggcgcccggcgcggcgcgatataatagaaaaattgctaatccttacggatattaatggtttgcttttcggcgggcgggttcttatccttaagaaaactcaagaggttattacgatgaaagatgtagtagataaatgcagcaccaaaggctgcgccattgatgtcgggacgatcattgataacgaggactgcgtctaccgggccgagaaggcgttcccaagccgcgaagaagcggaatccaccgtagccgccgtgcgcgaacgtgctgccgccgcagcgccggccagtgaaccgccgcaggtcgattacaccatcgtcgccgctggcgacgcggtgaaactcgacctctccatcgccttctcctgccaggcagaaaagatcattttcgagttatccctgcgaaatctgctttaattcgcgcctgtagcggaagaacgttgcccctgacgggcagacgccttccgctggagcagcacgctgcccgcccggcgacctgagccgggtgagcgcggttagtcttgaaagacgacgtttccgccaaccatggtcatcaccacgcggctggcgccaatctcctcatgggctacggcgaagatatcgcggtccagcacctgaaaatcagcgactttgccgacctctatcgatccgcgtaccgcttctttcccttcctgataggccgcattgatggtgtacatccgcacgccgtccgccacgctaattgccagttccgggcgaataaccttgccgctggaagatgatttgcgggtgaccgcggcctgaaccattttgcgccagttcaccagcgccataatgccatctgacccgccggcgatgatgaccccaaggtcgatgatatcccgtagccctttgcagatttcccccttgatgccacagtagcgggcgcgctgttcatagtcatatgccgggccgccgggtgagggttgttcggaaagcagaatgccgtattttgccgccatcacgaaatcttgccgatcgcccattgagccgtgcagcacataatgccgtcggctctcccccggatagcgctgaatcgcctgcacgaagctgttaatcgtgacttttaccgccttatcgccgaccgcatggactgccacctgaaaaccgcgctggtgagccagcagaatcatctgctgtagcgcctcaacttgtgcttcctcggtcgcctcggggccaccaaacaccgagcgtccgcgatatcccggccggtcggcgtaatcctgattcatccacgctgtgtgcgatgtgggaacgccatcgcagaacagttttatggtccgacagtccagccagtcccggtcggtgaactgggagaaatcaaagctatccagatcgcgcttcagggtggcgcaggattgaaccccccgctcggcagagtaaaaggcgatggatacccgggcggtgagttttccttcatcctgcagttcacgataggcggcgatggcgcgatcccccgcggcgcccacctcgcgcgtgttttcccccggacccatggcgccttccgtgtagctggcatacccttcgctgttcatcaggcgctgggctgccagaagattctctttgagggccgctacggtcagacgcggcatcgtgccggatgcgagatgcagggcgggcaggtcgatgaaattgccgtccagttcgccactggccgttcgccccagatgtccgccgaggggatcaggggggctggcgtcaagaccggagagggccagcgcccggctgttgacgatgcaggagtgaccgtcccacagggcgagcagggtgggatgatcggccgtgacgtcgtcaatatcccagcgcgtcagagagcgctgctcggccgcgcactccttgattgcgtttggatccagaccgcagacacgaatccatgccccggcgggagtgcgggctgcctggtcgcgcagtctttcccgcagtactgccagggaacgcacgtcctggcagttcaggcaatgccagctgtcagcgagccagccgatatggatatgtgagtcatgcgcggcgggtaaaatgagtttgccgccaaggtcaatgacctgcgtctggggaccaatatgctgctgaatctcctggtcttcaccaacgttaataatccatccctgcttcacggcgatggcgcgcttaaaactaaaatgtgcgtccaccgtggcgaccttgccgttaatcaatacgcagtccgcataaacgacattatccatttatccctccctggctgataaaagtgccgatcaatataaatagtaaccatggtgattatgtggttactatatgactacgaagggggtggagtgtcaagcgcggttggttggcgggtgtccgcctggcggtggaatagacggtaaggaaaagcgcttcgcccgccgatcgcgagaggcatcggcggggaaggggcgtgttattcgaagcgccaggcgaggttcaggccgatgccgtagttacgtcccggggcaggctcgtagtaacgtccgttagactcgttaacgatgacagacccgacgtactcccggtcgaacaggttgtcgatgcgaccgaacagatccatatccatcctgccgtagctccatttatagccggtcgtcaggccaaccaccgtccaggagggcgctttggcggtgttttcgtcattggccatgatatcgctcatatagcgaatatcgctcccggcgtaccaaccttgctccggctgatagccaaaggaggcgtagcccatattgcgcgcgatccccggaatgcgattgccattgcagctggcgtcgtcgcagacgttagtgcgataggtcgcgtccagccaggtccaggccgccttcagacgccagctctcgccaaactgctgatccagccccagctccatcccctgacggcgggtcttgccggcgtttttataactggtgcgcccgccgctgctgctgtcgaccacaatctcattatcggtattggtctggaacagggcggcggtgaacagcccattgccgatccgcgtcttgctgccgatctccaccgtgtcgttggtggagggtttcaggccgaagttgaggccgctctggttatcggagcggtaggagagttcgttaatggttggcgtctcgaagccgcggccggcggaaagatagacgttccacgcgtcggtcagggcatatttcagcgagcccgcgggcagccatttgtgatagctggcatcaccgctgtcatcgccattgcctggggtgatgtagtagtcgttcgagtcgaaccataccgagctgtagcgaaccccggcatcgagcgagagtttgtcagtgagctgccactgggtctgcaggtaggggtcgacgttccacatcaggttgcgttcgttacggcgcagcgcgccctgttcgccatactgcggcgcgccgttgaccatcacaaagttttcataccctttgcgccgctcgctcatgttctcgtagtcgagaccggcggtgagcgtgacgggcaccagcagctctccgcgatgggtcagccgggtatcgatcccctggtagtgacgggtaaggtcgatcaccccgccggcatggctcggcttcagctgcggcgcgcgggggatcgactggaactgcgtggtttcacgttctccagcgtacatcataacgctgagatcgtcctgggcactgagctggcgctcatagcgcaggccggcctgggtctgtcgggtattcttgcgggtattatactggtcgccgtgcggtgactggcgcgggttatcgcgccattcatcggcggtcaggccaccggcgtcattggctttgatatccacgctattcagcagcagagtcagcttactgacgtcgttgatgcgcacccccagccgggcgttcgccagatttttgcgcgcgccgctgtgatcgcgatagccatgggtggtgaagcgattggttgagaccgtgtaatccacatcgcctgcgtggctgccgtcgccaacggcgccagtggctttcatcccgtagtgccaggtgccgaagctgccatagtagctgctggcttccacggtgggcggctgggtgccggtctggctggtgacgttgatcaccccgccggacgagttaccgtacagggcagagaaggggccgcgcagcacctcaatggtgtcaacgctgccgatatcaatatttgaggtctgcccctggccgtcgggcatggtggccggaatgccatccacatagatgcgcagtccgcgcacgccataggttgagcgcgagccaaagccgcgaatcgacagctgcagatcctgggcatagttttgccggttctgcacctgcaggcccggcacggcgcccagcgattcagagagattgacgcgcggcgcggcctggcgcatctcatccccattcaccacgctgacggcggcgggggtatccagttcagaaaccgtggttggcgcggcggtcaccaccatggtttgttcatcagcggcctgggctgcggcaatgagcggcaagagcagggccgggagggcggcgtgacgcacggacaggattttcattgataatactcaaagacgaaccaaatggaacatatgtatatatgttacctcgtttgtaaaatatttgaaaattattaactgctactggttaacggatagtgctcgccaggcataaatttaccgcacaacaacaattagcgctccactttgagataaataatgattactattcgcattcaaaaacaagggtaaagccaggactttaccgccggaagcgatgtcgggtcagcacatacgggtttatcaaagggagtcgtcatgtcattacgtcattttgccgcgccgcgtctgcgccattcactgctcgtcacttctctgctgctggcaggcagctttagcgcccacgccgcggaagagatgctgcgcaaggccgtcggaaaaggggcctacgaaatggcctacagccagcaggagaatgcgctgtgggtcgccacatcacagagtcgttcgctggacaaaggcggggtggtttaccgtcttgaccccaccaccctcgacgtgacgcagattattcacaacgatctgaagccgttcggcgccgctatcaaccatgccaccggcacgctgtggtttggcaataccgtcgacagcactgtcaccgctattgacgccaaaaccggcgccgtgaaggggcgcctggtgctggacgagcgtcagcgcagcgaaaccgtgcgtccgctgcagccgcgcgagctggcggtcaatgagcagaccaacacggtctacattaccggtctgggcaaagagagcgtaatttgggtggtagatggcgcgaccctgaagctgaaaacgaccattaccggcaccggggcaatggcgacgggtctggcgatcgatccgcaggctaagcgtctgtataccaccaacgccgacggcgaactgctgaccatcgacagcgagagcaacacgattgcgtcgcgcaaaaaattgcaggatgacggcaaagcgcatttctatcttaacctgagtctcgataccgccggccatcgtgcctttattaccgacagcaagcagccggaagtgctggtggtcgatacccgcgacggaaaggtgctggagaaaatcgccgcgccggagtcgctggcggtgctgtttaacccggcgcgcaacgaagcctatgtgacgcatcgtaaggccggggaagtcagcgttatcgacggcaagagctacaaggtagtgaagacctttaaaacgccgactcaccccaacagcctggcgctctccgaggacggaaaaacgctgtacgttagcgtgaaacaggcttccagccgtgagaaagaagccaccgcgccggacgatgtgatccgcatcgccctgtaagacctcagcgcgacgaaaccggaaaacggtggtcgcgctccgcatgccgccgggccaggcctggcgactcaccctctgttacaaacgcctattggcctgacaaaccagatggttatacacttaaccctttcccgccacgtgcgggcagtggtaatcagtggagataaaatgaaaaagccattcatggtgatttgcgccggcgcgatgctggcgctgctggcaggttgttcgtcaaactacgttatgaccacgaagagcggtcaaactatcgttacccacggcaagccgcagctggataaagaaacggggatgaccagctatatcgatgagtcaggtaataagcgggaaattaacagcagcgatgtgtcgcagctggttgaagataattaagttctgacctcccggtttgcccgctatggacaaaccgggagtcctgccagttacttcctcagcgtcggcgccgtgctgtgaatctcatgcacgcgtttacgcacaccaaaccagccagccaccagcaataccgccagcagcggaattgatcctatggtgtaggtaccgttcggataatcgaaggccatcagcaccagcacgctgaacaggaacagcagcgtcagccaggaggtgaacggcgcccccggcattctgaagctgacctttgccgctttcccttccttgatcgctttgcgcagacgcatctgacacaccacgataaagccccaggaggcaatgatccccagcgaggcgacgttgagtacgatctcaaatacctgagatggcaccagatagttgaggaaaaccccgactacatatacccccagcgtcgccaggatcccggcgtaagggacgtggtgacggctcatcttcgacataaacttcggcgcggagcctcccatcgacatcgagcgcagaatacgcccggtactgtagagacccgagttaaggctggagagggccgcggttaacaccacgatgttcatcacgctgccgatatatggcacgcccagctttgagaagaaggtaacgaacgggctctgtccggcctggtaggcgttccacggcagaagcagcaccagcaacaccaccgaaccgacatagaacagaccgatacgccagatcacgctgttgatggccttcggcaccattgtctccggatccttacactctccggccgcggtccccaccagctcgatggaggcgaaggcgaagaccaccccctgcaccagcaccagcgccggcaggaggccgtgcgggaagaagccgccgttatcggtgatcagatggaagccggtggcattgccgtccagcggcttaccggagccgaggaaaatggtgccgaccacgagaaaggcgacgatcgccagcaccttaaccagcgcgaaccagaactccatttcggcgaaccacttcacgccgatcatattcatggtgccgacaatagccagcgcgccgagggcgaagacccactgcggcacatcgccaaacgcgccccagtagtgcatatacagcgccacggcggtgatatcgacaatcccggtcatcgcccagttaacgaagtacatccagccggccacgtaagcggctttttcaccgaggaactccctggcataagagacgaagctgccgctcgaggggcggtggaggaccagttcgccgagggcgcgaagaataaagaaggagaagatgccgcagaccagatagaccagggcgagcgctggccctgccatttgtaaacgtgccccggcgccgaggaacaaaccggtaccgatagcgccgccgatggcgatcatctgtacctgacggttgcccatcgctttgtgataacccgcttcatgtgagttaagccagtggcgttttgcagcatgatgctccgctgcattttcgtgtttcgtattcattgatgtatcagtttcctgtcaatgcccatgtttgcagccggaatggaggacggctggcacattatgctggctttctcatcattctgacgtaggagataagctcagacatggcgctgaatcctacacgtaacctaatagttacgcacctaaaacatttaccgatagcatttgacagatttatcaatgagatcagcgtcgcagagtttccagtaacagcgtgaaagcgctggtatgctggcgccggctggggtaatagagatggtagccggggaaggcaggggtccactccgccagcacccgcaccagccggccgctggctaaggcctccgccacgcagtcatccggaacgtaggccagcccgaggcccgcctccgccgcgtcgatgcgctgcggcaggctgttgaggatcagctgtccctccacccgcacctgaatctcccggccatcgcgggcaaattcccaggcgtaaagtccccctcgtgtcggcaggcgcagattgatgcagcgatgttgggcaagatcccagggcgtttgcggcgtaccggcccgctgcagataggccggcgaacccaccaccgccatccgcatatccggggcgatgcgcacggcaatcatgtcttttgccacctgttcgccgagacgcaccccggcgtcgaagcggtcacccacgatatccgtgagcccattatcaacagtgatttcgatgttaatatcaggatattgcagcataaatggctttagcgccggccagagtaccgcgctggcggcatgctccccggcggtaatgcgcaggttgcccgccgggcgttctcgggtgtcgcgcaatgcagccagggcctgctcgatctcttccagatgcggaccgaggcgctgaatcagtcgctcgcccgcttcggtcggcaccacgctgcgggtggtgcgggtcaacagccggacatcgagccgcgtttcgagatggcgcatggcatggctgagcgccgactgcgacacgccaagctgggccgccgcgcgggtaaagctgcgttcacgcgccaccaccataaaggagagcagatcgtttacgttctcttttagcataatctttccggattgatgaatactgctcacaggtacgcagagtgtatgcccggcctgaggattgtgccagcctgatagccggacgcagtggagcagaatggttatggcggatgatttattcctctgtgcagggcaggtattgtagtaggcccaaaaaacgccagcgccaggtgaaccgacattcgctggcgcggcatgaccgggggacggcagcccgaaagatgatcaagagtatcgccaggcagagtctggtaaccggggagaaacagagatgaatatcaacgtggtcggcaccagcggctcaggcaaatccactttggcccggcgcctggcgcacaggctggaattaccctggatcgagctcgatcgcctgtactggcggccgaactggcagggcgcgccggatgaggcatttttcgccgccattgccgccgcgacggccacgccgggctgggtgctggatggcaattacaatcgcagccgcagcgttaaatggcgtgcggtggatttggtgatctgggtagattatggtttctggcgcacgctgcgccaggcggtatggcgggcggcgagccgggcgtggcgacatcaggagctgtggccgggcacgggcaactgcgagagctttcgccgttcgttctgcagcagggaatccatcatcctctggacgctgaaaacctggcggcagcatcgccgacgctatctggccgatatgcaggatccgcaatatcgtcatattcgcttcgtccgggtgcgcaatccgcggcaggccgaggcgctgctccgcgagctggaagcgcagcgttcagccgggcatatctaattttcagcagtacacatgtgaattaattgtttctcaatagttagcagagattttaataatgcaggcacgtactttcatatgagcctgcgaaatgtcttatcgaatcagtattctggataaaagtccgcttgccgccggggaaaccgccgcgcaggcgctggcgcgtacattaacgctggcgcaacacgccgaagcctggggctaccaccgcttctgggtcgccgaacaccacaataccgatcagctggcgagcccctcgccggagctggttatcgcctggctgctgggccacacccggcggatccgtcttgggtccggcggcgtcatgctccagcactatagcccctataaggtcgcggaaaactttaacctgctggccgccctcgcgccgggccgcatcgatctcggggtcggcaaggcgcctggcggcctgccgctctccacccgcgccctgcagcagggcctgcatcaagaggagaaagggacctttgccgatcagctggcgcagctggataactggctgtcgctgactgagcccgggggagaggagagcctacgcgccacgccgatcccgccgcgccgggcagacggttttctgctcggcgccagcctggagagtgctgaactggccgcccgccttgactggaactttgtctttgccgcccatctcaatggcgacagcgcgctgcgccgtgccgtgttcaaccgctggcgcgagctcagcccgcgtgaggcgatggtggccgtccaggtggtggttgctgacgatccggccaccgccgccgcgctggcgcagcaggtcgaggtgtggggcgtcgagctggagaacggccagcgggtgaccgtcggcagtgaggcgcaggccgtcgcttttgcccgccaggccggcagccgaccgacgcgcattgcccgccgtgaatcttcgctgatctccggtactcccgaacaggttaaagcccggcttgacgcgctgcaggcggaagaacagttggatgaactcatcattgatacccccattagcgacgggccagcgcgcctgcactctctgcgcctgctggcgcaggctcactacggcaaggaggtgctgaatgtcctttgaacaacaactgattagctggcggcgcgagctgcaccagaacccggagctctccctgcaggaggtggccaccaccgcgcggatccgcgactggctgcagagcggcgggctgaccctgctgccctacgatctgaaaaccgggctggtcgccgaagtcggcagcggcgacaaggtgattgccctgcgggcggacatcgacgcgttgcccatcgaggaggcgaccggtctgccttaccgctcgcagaatcaaggggtaatgcatgcctgcggccacgatattcacaccagcgtgatgctgggggcggcgctgctgctgaaggagcgggaagcggaactcccggggcgggtgcggatcctgtttcagccggcggaggaaaattttggcggggcgaaaaccctgatccgcgccggggcgctggaggaggtgtcggcgatcttcggcatgcacaatgagcccggcctgccggtgggcgaatttgccacccgcggcggcgcgttctacgccaacgtcgaccgcttcgtcttcaaagtgaccgggaagggggcgcatgccgcccgcccacatgaaggaagggatgcgatcctgctggccagccagctggtgacggtgctgcagagcgtggccagccgggaggtgaacaccctcgactcggtggtgctcagcgtgacgcggatccagggaggcaatacctggaacgtgctgccggagagcgtcgagctggaggggacgctgcgcacccacagcagtgaagtgcagcagcgggtcaaggcccgggtcagcgagattgccgccggtttcgccagcgcctttggcgcgcagattgacgtcttctggtacgccggcccgacggcgctggtcaacgacgcccgctgggccgacttcgccagcgaggtggcagcccaggccgggtatcgcacccaccatgccgatctgcatctcggcggcgaagattttgcggtctatcttcagcatattcccggggcgtttgtcagcatcggcagcgccagcgaatatggtttgcaccatccggcatttaatccggatgaacggctgattgcgcccgcggcgcactatttcgcccgtctcgcggaagaagcgttacaacacatttaacgaatgacaggggaaggggtagctatgtctgaaaatcgacaattgcgtctgggaaccatattgcatggcgcatcgggaaatatgtccgcctggcgtcatccggcggcccaggcggacgccagtattaattttgatttcgtcacccagacggcgctaaaagcagaagcggggaagctggattttatttttgtcgccgacggtttatatattaacgaaaaatcgattccccattttttaaatcgcttcgaacccttaacggtactttccgcgctggccgcgatcacccggcgactggggctggtggggaccttatcgacttcctacagcgagccgtttaccaccgcccgccagttcgccagccttgaccatttaagccagggacgggcggggtggaacgtggtcacttccccgctggaggggtcggcgaaaaacttctcccgggcccaacatccggatcatgcgctgcgctatcgcattgccgatgaatacctgcaggtggtgaaaggcttatgggattcatgggaagaagatgcctttgtgcgcaataaggagactggccagttctttgataaaaataaactgcatacgctcgaccaccacggcgatttctttaaagtcgccgggccgctgaatattgcccgcacgccgcagggccgaccgattattttccaggccggcgcgtcggatgacggcaaaaaattagccgcgcgccacgccgatgccatttttacccatcaggactcgctggccgaggcgcaggcattttatcgggatgtcaaaagccaactcgccgcatatcagcgcagtccggaccaactgcatatcttccagggcgtcagcgtcatcgtcggagatgacgccgaggacgcggagcggcagtaccagaccaccgcggcgctggtttccatcgaggatgccctgaattatctcgggcgctatttcgaacaccatgacttttcgcagtacccgcttgatgaaccgttcccggatattggcgacctcggacaaaacagcttccgcagtaccaccgatgagattaagcgtcacgcccgcgagcggggattaaccttgcgccaggtggctctggaggcagccagcccgcgtccgcgctttaccggcaccgccagcgatgtcgctgatggcctgcaactgtggttcgagcagcacgcggcggacggcttcattattcagggcggcacgccggaaaccttcccgcgctttgtggatgaggtggttccgctgttacaggcgcgcggactgttccgtcgcgactatccgggcaccaccctgcgggaaagtctgggtctggcgctacccgctaatcaattccaaaaataataaaagagaatcacgctatgcagaaaacaacactcttgctggccgtcgcgttggcatttagcgcctcatcgtggggtcaggacgtcaagatcaatggcaccggagtgagcctggaggccaacaaaacgccgattcacacagcgaaaaatccgcaggccattgccctgttgccgcaagatctgcatctggcggtgccggggaaattcaccgtcgcggtggcggccctgaactctccgccgctgacggtctttgccgatgacaacaaaaccctgctcggcagcgaggcggatatcgcccggctggtggcggagagcctcgggctggaagtaaacgtggttcccacttcatgggaagactggccgctgggggtcacctccggcaaatatgatgccgcgatcagcaatattaccgtcaccaaagagcggaaagagaagttcgatttcgccacctaccgcaaagactcgctgggcttctacgtcaaaagcaccagcccgctgagcaagattgacaaagcggaagatatcgccgggctaaagattattgtcggctccggcaccaaccaggaggcgatcctgctggcgtggaacgcggagaacgtcaagaaggggcttaagccgtttatcccggtctacaccaaggatgatgccgcccagacgctggccctgcagaccggacgagccgacgccttcttcggccccaacgtgattggcgcgtggaaggcggcgctgaccggcaaaaccaaactggtgggcagcgtcgatggcggctggccgaaagcggcgcacatcgcggtaacgctgaaaaaagacagcgggctggtgaatgccgtccaggcggcgctgaacggggctatcgccagcggggactacgccaaagtgcttaaccgctggggcgaaggggtggaaagcattccgcaatcggaaatcaatccgcccggactgggcgactgacaggaggcgcgatgagcgaagcattccgcgatatttctccggaggctccggagctgcagccgattattagcgggctgtttgccgaatatgccgcccgctacggcgactatttttcccgcgatgcggaagtggagttaagtgagtggtatgtgccgccgcaggggctgtttattgtccttgagcgtgagggcgaaattatcgccaccggcgcgtataagccgaaggatcgccacaccgcagagatcaaacgtatctggacgcaccgccgtctgcgccagcaggggctggcggcgaaggtggtccaggagctggagcgacgggcggtgctggccgggtacagccatatctacctgaccaccggtttccgtcagccggaggcggtaaagctctatctcagccaggggtatgaggcgcagtttgacctcacgagagacccggaagagtacagtcagccgccgtacgatggccggctgcggttcactaaagcgctggcggtgagcgcctacagccacagcgcctgaggaggcattatgcattcatctgaaacgatcaaagtagtgccggcgcgctatccgctgcgggtggtcggggctctggtcgccctgctggtgctggcggtggtgatccagtcggtggcctttaacccgcgctgggagtggggcgtcttcgcccgctggttcttcgacccggtgatcctcgaggggctggggcaaactctgctcctgaccctgctcggcacggtgttaagcgtgatcttcggcggcctgctggcgctggcccgtttgtcctcatcgtggctgctcagcagtctcgcctggggctatatctggctgtttcgctcgctgccgctgattgtggtgctgatcattctctataacttttcctatctctacgacaccctgtcgctggggatcccgtttaccggcgtcacctgggccagctatcagaccattaacgtgctggggcaattctccacggcggtggtgggcctgaccctggtgcagagcgcctataccgcggagattattcgcggcggctttctcggcgtcgaccacgggcagtatgaagccgccgccgcgctggggctacccgcctggcggcgcacgctgcgcattattctgccgcaggcgctgcgcaccatcctgccatccggcttcaacgagatcatcagtctggctaagggaacggcgatggtgtacgtcctggcgatgccggagctgttctacaccatccaaatgatctacaaccgtacccaggaggtgatcccgctgttgatggtcggcgccgcctggtatctggcgatcaccagcgtcctctccgccattcagtatctggtggaacggggcctggcgcgcagcgaacgccgctcggcggtaaacagcgcccgcagcagccgtctgaatcaacccgcacgtcaaccacagccgcaggaggccgttcatgcccagctctcataatggccatatctctatcaccggggtcagcaaatactatggccgccacaaggcgctggacgatgtgtcgctggagatccccccgggcacggtgacggtgatcctcggcccttccggctcgggcaagtccacgctgctgcgcaccataaatcacctcgaacgggtcgatgagggatttattcagattgacggcgactatatcggttatcgccgcaaaggcgacaagctgtatgagatgaaagaaaaggagatcctccgccagcggatcaacgtcggctacgtgttccagaactttaacctgtttccgcacctgacggtgctggagaacctgatagaggcgccgatcgcccaccagcaggtcacgcgcaaagaggccattgcccgtgcctatgaactgctggacgtcgtcggactgcgcaataaagccgacgcctggtcgcggcatctctccggcggccagcagcagcgtatcgccattgcccgggcgctggcgctgaacccgcgggtgatcctgtttgatgagcccacttcggcgctggatccggagctggtgggcgaggtgctggatgtgatcaagaagctggcgcgatcgggcaccaccctggtggtggtcacccatgagattggctttgcccgcgaggtggccgaccaggtggtgtttatggtcgacggcaggatcgtcgagcagggcagcagcgacgaggtgctcaaccatccgcagcatccgcgtacccggcagtttttatccagggtgctgccgtcatgaacagagcgctaatgacccttgttctcagcgcttttgccatgagcgcttacgcggcgctggatctgcgcgccaatgagcagccattgccggtcacccgcgacccgcaggcgatatcgaaaattccgccgggctatcgcttcgtcgagccggggacgctaacggtggcgatctcggcgctcaattcgccgccgctggccctgctggccagcgacaaccgcacgcggatcggtagcgacccggatatagcccgcctgctggccggaagccttggcctgaagctcaggctggtgcccaccgcgtgggaggactggccgctgggcatcgcctccggccgctacgatgtggcgctgatcaatatcgcggtaaccgagaagcgtaaagagaagttcgattttgcgacttaccgggtggactccctggccttctcggtgaaatccaccagcgatatcgccgcggtaaacggacccgccgaccttgccgggcgcaaagtgatcgtcgggtccggcaccaatcaggagcggatcctgctgggctggaacgaggacaaccgcgccgccggacggccgcaggcccagccggtctacctgaccgatgatgcctccggcaatctctatatccagtccgggcgggcggatatctttttcggcccgcagtcggtggcagcctataaagcggcgcttaacggccagacccgggtggtgggcctggggccgaaaaaagcgtgggtggcgacaaccaccaaaaaaggcaacggtttggtctatgccctgcaggcggctctcgacggggcgattgcccgcggtgaatatcagcaggtgctggcgcgttggggggagcagggcgaagcggtggcgcagtcggtggtcaacccgccggggataacctactaacccccagtggcatggtgtgccgggtaggtgagcggcgtttttctgcctacacttaggctttaccctggaggccgaccatgataaccgtttatggcgtgccgggatggggctcgacgattagcgagctgatgctctccctggccgatattccctacgaggtggttgacgtggagggctttgatcagcccggtccggcgcgcgagcgtctgcggcagattaatccgctgtgccaggtgcccaccctgaggctggccgacgggagcatcatgaccgaaaccgccgccatcgcgctgatgatcctcgaccagcgtcccgatctggcccccgcgccggggacgccacagcgtccgcagtttcagcgcctgctggtctggctggtggccaatgtctatcctacctttacctatgccgattacccggaacgctgggcgcccgccgccgcggagcagctggtggagaattgtcgccagtaccggaaaaatctctatctctggttcgaacagcagctggccgccgggccgtgggcgctgggcgcgtcggtaacgttgctggattgctatatcgcggcgatgtaccgctggggaccccgccaggcgtggtttgacgaccacgcgccaaaattcgccgccatcgcccgggcggtctgtcagcgaccggagctggccgcggcgctacgtcgtaacaagctgatttaacgcacgcgatgccaaccagaacggccattctgtggtagcgttatggctctcatcacaaggagtctttgctatgccgcatgttgatattaaatgttttccccgtgaactgactgatgaacaaaaaaccgcgctggccgccgacatcactgaggtgctgatccgccatctgaacagcaaagagagcgccgtcagcgtcgcactcactcaggttgagccggacgcgtggcaggcggtgtgggacagtgagatcgccccgcagatggcgcagttgattaagcagccgggttatagcatgtaacccgacacccggaggcgatgctgcgcatttgtccgggctacgcgctctcagcggtctgcagttccgtagcccgggcaaggcgctttgcgccgcccccggggaggggcttctccggcgacgcactgagagaaacagcatgttcatctatcctaagcgccagagagccaaccgaggtgggtatgaaagacgaattgtttgccgatctgctggcgagtgcagaagaaatggtcaggatcgagaaaggtgaacaaatgccgatggagcagcacgttcataccttcagcgaaattgacgtgaaagcgatacgtgaagccacaggtttaaaacagcaggactttgcagcggccgttggcgttagctacgagttggttaaaagctgggaaacgaaacgacgtcacccaaccggtgcagccagaaaactgcttttattgcttcagggtaatccattgattatcaacttgttgaaggttgtttgaaaggttattcttcgcaagaaaaatggcagagtttgccctctttcgtaaccggggcctttaaaaaggagtgcattacgtatggaaaccaacgattctattttgaaagaaatcaagaaatacagcgctcatattgataggtttagagcgcgagcaaacactcatggtatctggttgtttattgctacccttggatgctggggggtaactgagcccagtattcggatattagcgttcgttatgcttttctttattttttttgtttcttctacacggtagctttccaggtgaaaagcgaacgtttaaaaagattcacgatgatataaaaaataaaatagttgataatttaacaccagagcaacagcaagaaaggtttcacgatcttctcatcgttgagaaaaaacgaaagtcacttgttggaattataaaaacaacctttatctttttagcctgttatggtttttattttatgagtttatattacttcatacagcactggcatagtgacaaagtaacagcgtgtatttaaatcaacccgtcctggcctttgagccggacgggccgtttgattaaaaccaaatctccgtctgcacgccgaagttccatgtcccaccggcggtaaagcctttgctgccgaaatcgtcatttatcgcgtagcgatccagcgctttatcccagttcatccaggtggcaaagaagcggatttccggccgcgccttgatatccagcacatcgcccactttaaaggtgggggcgaaggtcagcttgtagaaatcaccgcgcaccgcctgatactgataaacgttgtcattatagcgatagctgcgcccgttcggattgagatccatatactgccacgaggcctcatacagcagggcgaagtgagcggagatcccctgtgatacccgcaggttaaacgtcgcccagtcgtagcggtcgccgtcgcgatagcggtcttcgctgtgctgggctatcaccgacggcgccagctgccagtttttccccaacggcaggataccgtacgacgcaaaacgcagggaggccgcgttctcggtcagatcgccatcgctccccggctgacgcgcttcggcgcctagtccaacgccgtactgcagggcgctttcagacacccccggcgccaggccgtagaactgctgtttgtcgtgcagggccagcatcgcgtagtagccgtttttggcggtgttatcgctgcgcagggcatagctcccggtggtcgaggtattatctttcaggtcatcgttgccctgggcggtcatcaccgtggtcatcagttgccagttgccgtaaaaatggttggcggtgaacagcagattctggatgtcattatccgcgtaattatcgctgccaaggtcgccgaagttacgtgcatacaccgaatagtcgccgcgcaggccgcttccccagtcgacatcattgatcccgccgccggtaccgccgaggaacatgatgtcgctatcggtaaagtggatatcgaagttatcccgatcgaagcgcttgccggcccaaattgaggcgcgttttaacggaccggtgaattcggcaaagttacccatctcgacgtacagctgacgaatgttcagatggtggctgtcgttatcctgaacccacggatccgggttggtggccccgtcggcgagcatggtcttgaagcgcgcccatgagccatcgttgaaggtgagctttttgccaaagctcagctcagcgtaattatctttttcgttaccgagacgaccgacatgggcatcgccgttgagcgaactggccggggagacgcccggcccgccgcgggcgcctttaccatggctgttgactaacatcccggaacgggcgtaggcgttaaaggtaaacccatcgtccggggcgcgcttcgccagctgctcgctcagttgctgattagtggcctgctgtttttgttcgcgagccgtggtctgctggctgagcgcctgcacctgctgctccgccgccgcggcgcgctgctcggcggcggcagtttgctgttctgcccgctgcgcgcggcggctggcctcgctggcctgctgttcagcgagattgaggcgcgcttccagctgcgccagccgttgctccacgctcaagccggcggcgctgacgctgatgagcggaaaaagggcgcagcaaaccgctgcgctaatcacagagatacgcataaaaatccttaatttatccagaggttaaatcagcgggggcgccttacatggcgggggattctccggcggtcggggccggggctggcgaggcgccgcgtccggcatcaaggtcggcacgaatctgctcatactgatcgtcgaggcggtagaagcggcccatccacagcatcgaggcgaggatcaatagcgccggaatgtatagatagcaggccttgatggccaacagggcgctgtcgctctgcgtgtggttggcgatatagccgctggaggagagcagcacgccggtgatagccccggcaccagccatcgccaccttgccgagaaaaccgtttatcgaggtcaggatccctgcggtattaatcccggttttccacacgccgtaatccaccgggtcggcctgcatcgagaaatagatagccgtgcgttggccggcgccgagggagaggatcacggccccgacgatcagtcccagaacgtgggcgccagacaccatcataatccccatcccgagcagattgaccgcgctggccaccagatagacatgacgttttttcatgcgtcgggccagcagcgggacggtgagggtgccgagcaggggaacgaaggtggagatcccggcgataaccgccgtcagctcggtattcccgacgtaataatggaagaagtacaccagggccccggtctgaaagaaaaaggcaccccacatcagaaagatattgctggcgaagacccaccacggacgattggcgcgcagactaatccaggcgcgtttcagggtcatgcgctccccggtaagggtgatcttttcttcgacgttgcgaaagctcaccagcaggaaaaaggccgccagtacgccaaaaatcaccgcggtatagaggaatccctgctgctggttgcctttgcctagcatgccgaccagcggcagcgtagccacggcgacgatggtggcgccaagggagcccagcaaaatgcgcaccgccgacagcgtggtgcgttctgcggaatcactggttaaaaacggcagcatggcgcagaacggaatattcaccagggtgtagaggaacgacagacacagataggtgacaaaggcgtacagcagtttgccggtggtgccgaaatccggcacataaaaggccagaatacacagcaggccaaaaggcagggcgccgatcagcagccaggggcggcagcgcccccagcgggtggtggtattgtcgatcaccagccccatcagcacgtcggccacgccgtctaccagccgggtgaccaggaacatcaggccgacataataggccgggagacccatgacgtcggtgtaaaagaacatcagatacagagagatcatctgccacacaaggttgcaggagagatcggcaatgccatagccaaggcgctgccgccacagggtaaacgttgtttctgccataaatcactcgcttatcgttgttgttaaagtccgtactggcgaataaaccaggccggggtacagctccacgcatggcagtaactgttgataagcttactgccatacggggaaaagtcaggatgttgggggtcgaaaatttcccagaaggtgtcggcgccgtaggtgaccatcgccccccagtaggctttgatctccgccaccgcctcctcgcgcaggccggactgtagcagggcaacaatgtgatgatgacgcaggtacggggtgttcatggcaatggcgggcggctgctgctgcaggcggcgcatcagcgcctgacgctgcccggcggtgccaacttccgccagcaccagccagatctgcgacgcccatgagacctgacgcacggcgccgctgataaacacctgccgctcgttgtcccacagatggtggagggcggcctccttcagctgccagagcgtggcagtgtagtcgggtacccgctgcggttcaaaacgctgcgccagccagagggcgcgctgcagacagtagatgagcaccccctgcgccgaggcctgtttattcagctccgcctgccagtcgataaatacccaccagtcatcgctgtcgcgcaccagcccctgcgaatcgcagcgggtcagcgccagctcgatttgccgccgcgccgtgggccacagctcaccgacggtttccgtgtcgccggtgctttgcaggtagttataaagcacgtcgacaaaaaacaatgagtaatcaaacagaaaggtgtcatcggcgcgtacctctggctgaacaaagacattggcggaaaccatgccatcttcccgggtatgggcggcaaagagatacaggcagcggcggaccagatcgtggtggccgaaggtcacgtcattcacctgcgcctgcaggcgcaggtcgcccagccacagccgacggtcgcgtttcggcccatcttcaaacacctcctgcatgcagtttttcagggtacgaacggcaacgtcatcaatggctttcaactgcggatcggcgatgaccgccgggtgcgggctgccggcagaggtgacggtttccagagcgatctcatcgaactgcagacgaaacttgcgcgacagcgctttgacctccaccttcaggtagcgcaggcaatagcgacgtggcagagcgacccgggcgggcaggacgtcaagccacagatcctgctgctgcaaccagctgctgctcagccatccctggtattcgctgaacggctcacagacttcgctcagcgtctcgccgaaggtgaagtgcagatgggccggggcatcgggcgggctgccgacgctgcggcagctgaactgcaggtagccaacaaaatggctgccaaaatcaataatgatgctgtcgccgacgttgagcggttgctgataaaactgctccggcgtgcagacggtattcccccgccagccgttcagcgctcctggttcagcgacggcctcgacgatggcctgcggcgtctggcgcaggcgttgcagcgcgggcgtcaggtcggccgcacgctgtaaaaagcgcgggtgacggatcatcgccacgctggaattgtattgaattgcttgtgacatactgcgtcctctccgttaggttaggcgcagcataggccgtcgtccggcgcggctaccactctggcaatgccaaaccgtcagtgaaaatggcaggaataatgaggtgggggcgctggcgatcacaaatccgcacatcgggcgcgtgccgagggctggaatagattatcgtgcccctgcgccataggttgttcaggatttgctgtaatgatgacactgaccgttgagtattatttcacccatccccaggataagctcggcatatacgccagtgacccggaggataatagccaggagcatggccatgaatttgccgaactggtgatcgtcgaggaggggcatgggttacacgttattaatggtcgcccgctgtatatccaacagggagacgtattttacgtccagcctggcgatgtgcattattatgatgagctggggacgctgaagctgattaatgtcttaattaatccggcggtggcctttggctatttacagcagatggagggattgctgcagcaattatccgcgcagcgcgccgcctgctatggctggctggcgccggagactcgcagctattgccgggaactagtggaaaagatattttccccggcgctgagggcggcggataataccccgctacgggagtctctctttttccagctggtgaccaccattctcacagccgagtcggaagccgaatatagcagcactcgctataaactgcataaattactcacctggcttcaggagcactgtttcgaagaacataactggcagcagctggcggagcaatttcatctcaccacccgcaccgcgtttcgccatattaaagaggccaccggattaaccccggataattatctgaaacgtctgcggctggtctccgcgcgggtcaaattacgcgaaacggagatgaccattaccgaagtggcttatctgtgcggcttcgccaacagcaaccactttaccaccctgtataaaaaagtgtttggcctgacccccagcgccgatcgccgccgcccaccgggttaaaagggggccgcaggccgggcaggggaaaaaccggccgcccgcggcaagtcacgcttattcgtcgagggagtttgcccgcacatgacggccgctggcgacaaaattgccggtgccaagatgatgcagggtattgagcttatcgtcgtcgaattgccagcgtccggtgacgaacgcgcgctcatcggcggcggcagagaccacctccccgaacagggtgtcgtactgggtctgggccgccgtcgccggcagcaaccggcactccatccatgccagacatttctcctcgatcagcggcagccccagctccggaccggttactaccgggatcccccaggcattgaatttgtcctcatcgcggccgctgacgctgccgacggcgtaggtccagctggcggctgcgacgccgggaactacaatgccgaaggtgccattgcgctcgatgatctcccgcgtccaggtgcttttatccaccacgatagccacccgcggcggggcgaattccaccggcattgaccaggcggcggccattacgttgcgccggtcggacggggcatcgtagctggtgatcaaaatggttgggccgtggttgagcaggcggctggcgtactgcagttcaacgtggcgaaagcggctcataggcgttccttgaataatgggtcggttggcaggtaacacgttaagccgcaatgaaaatgtaatcaatacgtcatctcgtctgactatagtcgccagcactaagtcccaaagaggatcacaatatgttggctcccctgatgctatcccaggtgagcgtgccccgtcggatgtcgaccgccgggctggtctcgctgtcccgaaagggagggcgatgatgcgcacgctgacccctatcaccctgcaggaggtctctttcgccttcgcagagacccctattcttgaccgcttcacgttgcatatcgaacccggccgcatcgtggcgctactgggcccttccggctgcggcaaaagcacgctgctgcgtctgctggccgggctgagcgtgccggccagcggcgaaatccgctttggcgacaggctggtcgcccgcgcaggatggggattgcccccggagcagcgcgatatcggcatggtttttcaggattatgccctctggccgcatatgagcgtggcgcagaacgtcgcctttccgctgcgcatgcgcggcgtctcccgcagcgaacgcgagcgccgggtcagcgaggcgctggcgcgggtaggcctcaacggctttgccgaacgtaagccttcaggcctctccggcggtcagcagcagcgggtggcgctggcgcgggcgatcgtcgccgcgccgcgggtgctgctgtttgatgaaccgctctccaacctggacagcgaactacgcgaatcgctgtgtggcgaaatgagccgcctgctgcgacagctcggcatcaccgccctgtatgtcacccatgaccgacgtgaagccgagctgttagccgaccagattgtctatttatccgcgggccgcgtggccgctgtccgcgccgttacgccaacctcaggggaagttgcatgaacaccgttatgaccgttaagaaaggagtggtactcgcgatggctctctccgccatgatgctctccagcgcccatgcgctgaccgtttacaccgccggacccggctcgctggcgaaaagcctggccagcggttttgaacaacagaccggggtgaaggtgaccgtttttcaggccaccaccggcaaagtgatggcccgactggaggccgagcaggccaacccgcaggcggatgtactgatctccgcctcatgggataccgccgaagatctgcaccagcggggctggttgttgccttttgcgagcgccaacgccgaccaggtaccggcgaacctgaaatcggcggactatatcgcccagggcgtctccgccctgggcattgtctggaacagtaaaagcggcaccccggaaccgaaagagtggcgggatctcacccagccggcgtttaaagacaaggtgacaacccccgacccggcgctctccggcgcgtcgctggatttgctgatcgggctgcaaaacagcatgggcgaccaggcctggcaactgtttgacgatctgaaaaagaacggcatggtggtcagcggacccaacgcccaggcggtgacgccggtgatgcagggagcgaaagcggcggtgtttggcgcggtggattatgtctcctacggcaatattcagcagggcgagtcgctgaaggtgatcttcccggccagcggaacggtgattgccccgcgcccgatgatgatcctcaaaaccagccagcatcccggcgaggctaaagcctttatcgattacgtgctgtcgccggaaggtcaggcgaaggtcgccgacgcctggctgatgcccgcccgccgcgacgtggcggctaaacgtccgctactggacgcgctgaaggtgctgcccaccaccagcgagggcagcagcgagcggggcgccgtgctcgcccgcttcagtcagctgtacgcgcagtaattgatcccgtttctccggcgctggccgccggaggaccctcagcttcaggaaccggttgtgaaacaaacattcctttccggcgcgacccttgccgccctggtgatgctggtcgcgttaccgttagtgtttattgtgctgcaggcgatttttccccattttagcgccggttcgctcggggacgcctttggcggcatcccggcgctgctggccgatcctcagctgccggcgatgctcggcggtacgctgtggatcgccgccggcgtggcgctggtcagcgtaatgattggcctgccgctcggcatcctgcgcggtatgttttcgctgccgctgccccggctgtgggatctcctgtttttgatcccctttctgacgccgccctatatctcggcgctctcctggatgctggccctgcaaagccagggctatctgcagcagctgaccggctggcagctgaacgatctgctgttcagccgcagcgggatcgtgctggtgatgacctttaatatatttccggtggtctactttgccgtctcccgcagcctgctggcgagcgggacccggctggcggtggtcgcccgcgtccatggcgccagcgcctggcgcgccttctggcacgtgacgctaccgatgctctctccggcgctggcggcggggatgctgctggcgtttaccctcgccatcgaggagtttggcgtaccggcggcgctgggcagccgggcgggagtggtgatgctgacggtcggtattgagaaaaagctggccgactggccggtggatctccctggcgccgcgctattgtcgctgctgctgatggcggtggcgttgttcgcctggtggctgcaaaggcggctggtgggggagaaagaggtcaccagcgtcaccggtaagccgggggagaaccacggggcatcgctgggctggatgacgctgcccgccgtgctggcgatggcggccgtcggcggcctggcggtcggcgtccccgccgtctcgatgatgctcaccagcgtgatgggcacgctctccggtggcgtgagtgttgagaatgtcacgctgcgtcatttcgcggcgctgtttgaccagcagggagatgccctgtcggccctcggcaccagcctgtcgctagccctgggttcggcgctaatcgtcggcgcgctgggcctgctggccgcctggctggtgatggtgcagaagattaaagggcgcgggatggtggacgcgctgtcgctgatgccggcggcgctgccgggcgtggtggtgggggtcggtttgatcctgctgtggaatcagcccttctggccgcgctcgccctataacacgctgtggatgctgctgctctcctattgctgcctgctgttgccctggccggtgcgctatgtcggcagcgcgctgcgccagctgggcccgaaccttgagcccgccgccagggtgcacggggcgtcgccactgcaggcgctgcggttgattgtcctgccgctggtctttccggcgctgctggcggcgatgctgatggtgttcgcggtggcctcccgggagctggtgacctcgctgctgctctctccggccggtacgcaaaccgtggcggtgtttatctggcgccagttcgaacagggttccgtcggtcagggcatggcgatggccagcctgacgttgttgaccggtctggtcctgatgctgacggcgctggcgctgatgcagcgccgcacgtgcggttaacgctaagcgcacaaaaaagacggtcggcgcggaaaaataggctataaatgtcggacacctacagctggaggccctgatgagtccctttttacgcgcctatttttcccgtctgagctggacgggtgagcctgatgtttccattgataccctgcgggaactgcatctgcagcataacagcgccatcccctttgaaaacctcgacgtcctgctgccgcgtgaaatccaccttgacgatggggcgctggaagagaagctgatcgccggccgccgcggggggtattgttttgaacagaatggcctgctggagcgcgcgctgcgcgagataggctttaacgtccgcagcctgctgggccgcgtggtgctggccaacccgccgcagatgccgccgcgtactcaccgtctgttgctggtggaggtggcgggggagcgctggatcgccgacgtcggcttcggcggccagacgctgaccgcgccgatcaaactgctggccgatatcccacagcaaacgccgcacggcagctatcgtctggtgcatgaaggggatgagtggacgctgcagttcaaccatcacgaacactggcagtcgatgtatcatttcgatttaggccgccagtatgcgtctgattatgtgatgggcaacttctggtcggcgcactggccgcagtcccacttccggcaccatctgctgatgtgtcgtcatctgccggaaggcggcaaaatgaccctcaccaacttccactttacccactgggagaataaccatgtggtggagaaggtcgattttgccgatgtctccgcgctgtatgaagggctgcagacccgtttcggcctgggggtggacgatcctaaacatggcttcagcgaagcggcgctggcggcggtgatggcggcgttcgatacccatccggaagccgggaagtaaatctccccatgcccggcggcgctgcgcctgcgcgggcctacggggtatgagcctgtgagaggaccctgtaggccgggcaaggcgtagccgccacccggcgaaattacaggaaccgtgcctgatatcttgcccggcgggcgctgcgcttgcgcgggcctacgggtatgagcctgtgagaggaccctgtagaccgggtaaggcgacagccgccatccggcgaaattacaggtaccgtgcctgatatcttgcccggcggcgctgcgcctgcgcgggcctgcgaggtttgagcctgtgagaggcccctgtaggccggataaggcgtagccgccatccggcataaagcctggagtcaggtacgataaatacccggatttggcgcgaaggcctcgtccgggctaccggtaaggatgaatggtaaacgccgccagcgctcagcgccgggagcgtaccacctggtaacgccgggtgaaatactccaccggcgcgctccagacgtgaaccaggcgggtgaaggggaagatcagaaagatggtcattccgagcaccaggtggacgcggtaaatccatgcgacaccgtccagatgcgccgaggcgccgccgtggaaggtgaccaccgcctgcgcccagtccaccagcttgagcatttcgctgccgtccggatgctgggcggagaaggggatggttgtcagccccagcgcgcactgaatcagcagaatgcacaggatcaaaatatccgcggtcgtggaggtggcgcgaattcgcgggttggtcaggcggcgcatcagcaggccgataccgcctaccagggtcagcacgccgcatacgccgccaaggatcatggccatcagctgcttctgggacatcggcaggaaccacgagtagacccagtgtggggtcagcatgccaaagagatggccaaagaagatgccgagaatgccgatatgaaataagttcgaccatagcaccatcccgcgcttatccagcatctggctggatgaggcgcgccaggtatactgcccgtaatcgtagcgcagccagctgcccaccagaaagacggtgccgcacaggtaagggtagatatcgtaaaagaagacgttcagatactggatcatttcgggcctccggcgcggatgtcaacgtactgcggcgccacatcctgactaaagcgtcgttgataagcttgcatcgacgagctatcgcaagcggtcgcattatcttcgataaacttcacctgctcttcttcccacacggcgtccagcgcctgacgggtatcgtcgcgcttttctcccgccacctgttttgtgacactgtcactggtgagcgggcttttagccagcgccagcagggcgtcaaacagctggtagtacgggcaggctcgctgcttaagacggccgccgatcagcgccagaatcggcgcgatattctgcagcccctcccgagcctccgcgggaggtagaatactgagatactccagatacagcggcagatggtcgggcagctcgcgacaatcgatctgcagacccgcctgttgatactgattcatcaggtcgaccatcgcctggccgcggtcgcgggattcggcatgcacatgttcaaacagcagcagcgaggtggcgcgcccgcgctcgaacacctcgcaccattcggcctggcgatccaacagcggagccgtcaacagctcaccgacaaacggcgtcagggaagggacatcggccctgatcagctccagggcgtcgtcgcggttctcccacagtaactcgtcggggtactccagcagcagaccgatcactttcaggatccgcatcactcgccctccccatgcttacgcacgccgctgacgtcgatggcgtcgatccgccggctgttaaacaggttgaatttcgtatctgacccgtggcagccatcgccgaaggtaaagccgcagccgttgcgttccgggaaggcatcctccgccagttcgcgatggctggtggggatcacgaagcggtcttcgtagttggcgatcgccagatagcgatacatctcttcgacctgctcaacgctgaggcccacctcttcaatggcccgggtatcggtgacgccctcgacggtttgcgagcgcttgtagtggcgcatcgccatcatccgtttcagcgcgcgcaagaccggtccggtatcgccggcgctcagcagattcgccaggtattgcaccgggatgcgcagactctcaaccgccggcaggatgttgccgttgctcggtaagccgccggcgtcggcaaccgactggatcggcgacaggggcggcacgtaccagaccatcggcagggtgcgatactccggatgcagcggcagggccagcttccagtccatcgccagcttatagaccggcgacttctgcgccgcctcaatgacgttgtgcgggatcccttgctttagcgcttcctcgatgaccgccggatcgtttggattaaggaacacctcgcactggcgctcatagaggtcggtttcatgttcggtactggccgcctcttcaatacggtcggcgtcatacagcagtacgccaagatagcggatgcgcccgacgcaggtttctgagcagaccgttggctgcccggactcaatgcgcggatagcagaagatacatttttccgacttaccgctcttccagttaaagtagatttttttgtacgggcagccgctgatgcacatccgccagccgcggcatttatcctgatcgatcagtacgatgccatcttcctcacgcttgtagatggcgccgctcgggcaggtggccacgcagctcgggttgaggcagtgctcgcacaggcgcgggagatacatcatgaaggtattttcgaactggccgtacatctctttttgcatggcttcgaagttacggtcgcgggcgcgtttctcgaattcgccgccgagcagctcctcccagttcgggccccagttaatcttatccatacgctcgccgctgatcagcgagcgcgggcgggcggtcggcagatatttgccctccggcgcgttgtgcaggtgctggtagtcgtaggtaaagggttcgtagtaatcgtcgatcgccggcagcaccgggttggcgaaaatcttcgataacacgctgacccgattgccgaggcggggcgtcagcttaccgctaatgccgcggatccagccgccttgccactgatcctggtcctcccagtttttggggtagccaatgcccggtttggtctccacgttattgaaccacgcgtactccatgccttcgcggctgctccagacgtttttacaggtgaccgagcaggtgtgacagccgatgcatttgtccagattcagcaccattccaacctgagaacggattttcattttttcgcctcctgtacctgatcgcgaccttcgtcatccagccaggcaatattcttcattttgcggatcatgatgaactcgtcgcggttcgatccgacggtgccgtagtagttaaagccataggccagctgggcgtagccgccaatcatgtgcgttggcttcggacagacgcgggttaccgagttatgaatgccgccgcgacgaccggtcacttccgaacccgggatattcataatccgttcctgagcgtggtacatcatggtcatccccggcggcacccgctggctcaccaccgcccgcgcggtgagagccccgttggcgttgaacgcttcaatccagtcgttatcttcaatgcccagctctttcgcgtcggtttcgctaagccagacgatcggcccgccacgcgacagcgtcagcatcagcaggttttcgctataggtggagtggatcccccacttctggtgcggcgtcaggaaattcagcgctttttccggaaagccgtttggcggcacggccttcatctggctgacgctgcgggtatcaatgggcgggcgataggctaccaggctttcgccgaaggcgcgcatccacggatggtcctgatacaactgctggcggccggagagggtgcgccatgggatcagctcatgcacgttggtataaccggcattataggagacgtgctcgctttccagtccggaccacgtcgggctggagataattttgcgcggctgcgcctgaatatcgcgaaagcggatcttctcatcctctttattgagcgccagatgggtatgatcgcggccggtaaactctcccagcgcctgccaggctttcaccgccacctggccgttggtttccggggcgaggctaagaataacttcggaggcctcaatggcgctgtcgatccgcggccggcctttggccggaccgtcgggcttgacgtagttaagcttgccgaggaaatcgacttcgctttgcgtattccacgaaatgcctttcccgccgttgccaagcttatcgagcagcgggccgagagaggtgaagcggtcccaggtggcaggatagtcgcgttccaccagggcaatcgacggtgcggttttcccggggatcagatcgcattcgcccttgcgccagtcaagcacctcgaacggctgcgacagttcgccgggggaatcatgctgcagcgggaccagcaccacatcggtctctttgccaagatggccgacgcagacctgcgagaaggatttggcgatatccttgtagatctcccagtcgctttttgcctcccaggccgggtcgacggcggcggagagcgggtggataaacgggtgcatgtccgaggtgttcatatcgtctttttcataccaggtggcggtcggcaggacaatatcggagaagagacaggtactggacatgcggaaatccagcgtcaccagcaggtcgagtttgccctcaatcgccgcggtctgccactcgacttcctcaggttttacctcatcgctggcgcccagttcatcaccctgaataccgctgtcggtcccgagcaggtatttcaacatgtactcatgccccttaccggacgatcccagcaggtttgagcgccagataaacaggttgcgcggatggtttttgccgctatccggctgctcggcggcaaagcgaatatcgcctgattttaacgactggacggtgaactcagcgggggagagcccggcggcctcggcctgctgcttaatggtcagcgggttgacgttgagctggggcgcagaaggtaaccagcccatccgttccgcacggacgttgaagtcgataaggctgccgctaaatttgctggcgtcggccagcggcgacagcagctcctgcgcggtcagtttttcgtagcgccactggctggcgtggttgtagaaataagaggtactgttcatctgccgcggcggacgactccagtccagggcgaacgccagcggcagccagccggtctgcgggcgcagtttctcctgaccgacatagtgcgaccagccgccgccgctctggccgacgcagccgcaaaataccagcagattaatcatcccgcggtagttcatatccatgtggtaccagtggttcaccccggcgccgaggataatcattgagcggccgtgggtcttatgcgccgtatcggcaaactcgcgggcgatttgttcgatatgttgacgcggtacgccggtgatctgctccgcccatgccggggtataggctttgacctcggcgaaatccttcgccgcattgacatcgtcaagcccgcgatccagaccgtagttggccagaatcaggtcatagacgctgaccaccaggccgctttcgccactggccagcgtcagctgtttagccggtagcgggtgaagggtcaccggtgactgcgctacgctgcgaaaatgcgggttttcgttgccgccaaagtaggggaagcccaccgacaccacgctgtcgcgaatatccagcagcgacagcttaagctcgacatctttgccgtctgcccgttgttcgagattccatttgcctttttcgccccagcgaaagccgatggagccgttcggcgccaccagttcgccgtcgctgttataggccacggttttccattccgggttattactttccccgagaccgtcaagcaggtcggaagcacgcagcatacggcccggcgtatagctgccgtcgtcgcgcggctcgagtatcaccagcatcggcatgtcggtgtaggtccggcagtagttgagaaagtaatcgctcgggttatcgaggtggaaggctttgaggatcacatggcccatggccatcgccagcgcgctgtcggtgccttgcttcggcgccagccactggtcgcagagcttagcgacttccgaatagtccggcgtgatggcgatagttttggtgcccttgtagcgcacttcggtaaagaagtgggcgtccggggttcgggtctgcggcacgttggagccccaggcaataatgtagctggagttgtaccagtcggcggattccggcacgtcggtctgttcgccccaggtcatcggcgaggcggggggcagatcgcagtaccagtcataaaagctcaggcaggtgccgccaatcaacgataaatagcgagtgcccgcggcgtaggagaccatcgacatcgccgggatcggcgagaagccggcgacgcggtccgggccatagtgtttgatggtccagacgttggcggcggcgatgagctggttcagctctttccagctggagcggacaaaaccgcctttgccgcgcgccgctttatagctgcgggtttttgccggatcctgcatgatgctatcccatgccagcactgggtcgggatgctgcgccagggcttcgcgccacagctcaatcagtcgtttacgcgccagcgggtacttcaggcggttggcgctgtagagataccaggagtagctggcgccgcgcgggcagccgcgcggttcgtgatttggcagatccggccgggtgcgcggataatcggtctgctgggtttcccaggtaacgaggccgtttttgacgtaaattttccagctgcaggagccggtgcagttcacaccgtgcgtggagcggacaattttgtcgaactgccagcgttgacggtagctatcttcccagtcacggttgttgttgtagacctggccgtggccgttggcaaaggtctcgcccttctgcttaaagtagcgaaagcgatccagaagtttactcatgacatttctcctgctccgatgatgtccggcatcgtgccacccggccggatgagcgaacgaactcgtaaggccggataaggcgtaagccgctatccggcagataaatcgttatggttaagcgggtttacggcggccgtagaccagccaggtcaccagcacgcaaaccacatagaagacaaaaaagactttcatcgcgccaaccggtgagccggtcatcgccagcgaggtgccgaaggctttcggaataaagaagccgccgatggcgccgatcgccgagataaagcccagcgcggcagcggtatcggtcaccgcctcgtgctgcgcttcttcatcgctgccgccgcgctgttttacgctgtcgatggtgagctggcggaagatgacggcgatcatctggaaggtggagccgcttcccagaccggcggttaaaaagagccccataaacaccacgtagaaagcgagaaagctgccggagccgctgcctggcagggtcagaaacagcaggccggtaaacagcgccatcaggacgaagttaaccagcgtcacccgcacgccgccgagacggtcggagatgatcccgccgaacgagcgcgccagcgcgccgatgaacggtccaaagaaggcgagcttgaggatatcgaccgcgggaaactgggttttcgccagcatggcaaagccggcggaaaagccgatgaacgagccaaacgtcgccagatagagcaggcttaacagccacatatgcggtcgcttgagcacgggaagctgatcgcgaatcgaggcctttgaaccggcgatatcgttcatgccgaaccatgccgcgacggtggcgagcagcagcagcggtacccagacgagcgccgcattactcagggtgattgtcgaaccatcgggctgggtgacgccatggacgccgagaaaggtgaagagcggcaggaagatgaccgccggggcgaccatctgcatcacgcttacgcccagattgccaaggccgccgttgactcccagcgcgctgccctgtttcgctttggggaaaaagaaactgatatttcccatgctggaagcaaaattcgctccggcaaaaccgcacagcagcgcaataataataaatacccagaacggagtagtaatattctggattgccacccctaaccaaatacaaggcacgatcaggataacggtacttaatacggtccagtagcgcccgccaaaaaggggtaccataaaggagtaggggacccgtaatatcgcgccggaaagtgaaggcagggcggttaataaaaaaagctggtcggtggtgaaatgaaaaccgaccttattgagattgaccgctacggcgctgaataacatccatacgcagaaagcaagtagcagacaggccactgatatccatagatttcttcgcgcaatggcttggcctttattttcccagaacgccttgttttcaggccgccagttgttcaaaaggtaatgattatctttatcattctgcaccgacatattgccctctacttgcccggaaaggagtaaataaataaggtcaacagctgaatacaaggggatagtgaataacgcttaatttgcgttatctatgaagcgtagataaaaaaaacgtgctgacagagagcacgtggtaagcgtagcggaattaattgttactaaatgtaaatatgcctaaaacaactccagcgtaatcatcttatttacatagcggctaaacgccgcctcatccagggcctgcgcgtccagcgcataaatcccgtcgaggccgcacaccagggcgataaagcgccaggcgatatccgccgcaggctcagccgaccgaaattcgccgctggcgaggccctgctcgatgatggcgagggtctcgccatgccacatattcatggtcagcaggtaggccgctttgatgtccggatcgctgtcggccagcacctggccttcgcgccacaggcggatatagggttccagtcggccatcctcgctgccgatcatcgagaacaagcgctcgcgccagctggcgtcctcagccaccagcggcatgtcgagcatctcgcggatcaggcggatgaaaacctgcgctttcagctcgccgatggaggtgaagtggtggtgcagctgcccggcggccacctgggcttcgcgggcgatctgccgcacggtcatggcggcaaagccgccgcgcagcgccaggcgcatggcggcctgcataatcccttcccgtcgcgcatcacgttgtaaatagtgcatagaaccccgctgtcatctggctttggccgagtgtaacaaaaagttggacatgtgttcaacaatccggcaggatcgccatcctggacgtgtgtccaatattcaatattgattgaggtacaagctatgtcacggcaatggatgacgctgatggcgattttgctggtttatattccggtggcgattgacgctacggtgttgcatgtggccgcgccgaccctcagcgtggcgctgggtagcagcggcaatgagctgttgtggatcattgatatctactcattagtgatggccgggatggtgctgccgatgggcgcccttggcgataagatcggctttaagcgcctgctgctgctcggcagcgccatttttggcatcgcctcgctgtgcgccgcgctgtcgccgacggccatgacgctgattgcctcacgcgctttgctggcggtgggggcggcgatgatcgtcccggcgacgctggccgggatccgcagcacctttgccgaggccagccagcgcaatatggcgctggggctgtgggcagcggtcggctccggcggcgcggccttcggcccgctggtgggaggtatcctgctggagcatttctactgggggtcggtgttcctgatcaatgtgccgatcgtgctggtggttatcgcgattaacgcgaaagtggtgccgcgccagcccgcgcgccgcgaacagccgctcaatctactgcaggcgctcgttttgattgccgcgatcctgatgctggtgtttagcgcgaaatcggcgctgaagggccagctggcgctgtggctcaccgcgctggtggcgctcggcggggcggcgatgttaacctggtttatccgcaagcagctgtcggcggcccgcccgatggtggatatgcgcctgttcacccatcgcataatcttaagcggggtgatgatggcgatgacggccctgattaccctggtcggttttgagctgctgatggcccaggagctgcagtttgtgcaccagaaaacgccgttcgaggcggggatatttatgctgccggtaatggtggccagcggcttcagcggcccgattgccggcctgctggtgtcgcggcttgggctgcgcgaggtggcgaccggcgggatgctgctcagcgccttcagctttctcggcctggcgttgaccgatttcagtacccagcagtggctggcctgggggctgatgactctgctgggctttagcgtggccagcgcgctgctggcctccagttccgcgattatggcggcagcgccgaaggagaaagcggcggccgccggggcgattgaaaccatggcctatgagctgggcgccggtctcggcatagcgctgttcggcctgatcctgacccgcagctacagcgcctctattgcgctgccgtctggcctgagtggcgccatggcgcagcaggcggcgtcatcgattggcgaggcggtgagtctgtcccaggcgctgcccgccggggtggcgcaggcgctgatggcggcggcgaagacggcttttattcaggctcatagcctggtgctggcgacggcgggtgtattgcttctgctgctggccgccgggatctggcgcagcctcgccaccgtggcgaaaccgcagtcggcgctatagctgcagcgacagatccatcgccgcgcgccgtagcggggcgagagccttctcttttaacgccgcggcgctgaccgtcgcggcaggtaccccgacattcagggcggccaccacctgaccgtgacgcgacagcacgggtaccgccagcgagcacaagcctacctcgatctgccggtcggcgagggcatagccctgcatgcgcacccgggcgatctctgcacgtaaaccggacaaatcgcacagggtatgcggagtgtagcgaataagcgtaactcgtgacaacgtcacttccagctgttcctccggcagcgcgctcagcaacacccgccccatcgacgtggcccacgccggcaggcggctgccgcgccccagatcgatgctcagtaaattattgaccgccgcgcgggcaatatagagcacgttatccccgtcgagcgtggctaccgaacaggattcgccgagcgctttgccaagattatccagcgccgtctgcgccaccttggccagcggcgtgcctgccagataggcgtggccgacggccagcacccgggggagcagttcatagctacggccatccggactgtgcaccatgcccagcgcggcgagggtatacaaacagcggcgtaccgccgcgcgcgagatttgcgttttctggctgagctgggaaatggtcagccgctggcgctggggggtgaaggcgttaaggacctccagcccgcgggccagagatagcataaagttagggtcgtgctcggcctgcctggcgctcagcgtattggggatattgtcgctcatcgcatccttctccgttgcagcgtaaagctcacggcagatcactataccttgcgcaaaatggggcgcgctgaattgtgccggttttaccaccacgatcacattaataaccgtcttttaacaaacgcgtcgataatcgcacaacatttcgattatcgccgttgaccatccgccaggctgaaccctattgtcaatggcacagacccccgttatggatgtgggtacaaaaagttatatatctcatcaggaacagaaaatgactgccaccgtagagcaaatcgagagctggattgtggatgtcccgaccatccggccgcataaattgtcgatgaccaccatgggctgccagtcgctggtgattgtgcgccttacccgttccgacggcatctgcggcatcggcgaagccaccaccatcggcggcttgagctatggcgttgagagccccgaggccatcttgtcagcgatcacccattatctgacgccgctgttgaaagggcagccggccgataacctgaatgcgctgaccgcccgcatgaacggcgccattaaaggcaacacctttgcgaagtccgccatcgaaaccgcgctgctcgacgcccagggcaaagccttaggtctgccggtatcagccctgctcggcggcgcgctgcaaacggcgttgccggtgctgtggaccttagccagcggcgataccgcgaaagatatcgctgaaggagaaaaactgttggccgaaggccgccaccgggcgttcaaactgaagatcggcgcgcgtgaactcgccaccgacctgcgtcatacccgcgccatcgttgaagcgttaggcgaccgcgccagcatccgtgtcgacgtcaatcaggcctgggacgctgccaccggcgcgaaaggctgccgcgaactggcggcgatgggcgtcgatcttatcgaacagccggtcagcgcccacgataatgccgccctggtgcggctaagccagcaaattgaaaccgcgatcctcgcggatgaagcggtcgcgaccgcttacgatggttatcagctggcgcagcagggctttaccggcgcttacgcgctgaaaatcgccaaagccggggggccgaacagcgtgctggcgctggcccgcgtcgcgcaggcggcagggattggcctgtacggcggcaccatgctggaaggcaccgtagggaccgtggcttctctgcacgcctggtcgacgctgccgctgcagtggggtaccgagatgttcggcccgctgttgctgaaagacgatattgtcagcgtgccgctcacctttgccgacggtcaggtggcgctgccgcaaacgccgggacttggcgtcgagctggatgaagacaaactgcatttttatacccgccagccgtagcggggaacaggagaaaaaaatgttatttaaagtggagatgactgtcaatattccgcctggctttcccgccaacgaggcggaggaaataaaaaaacgcgaaaaagcctattcgcaacaattacagcgggaaggcaaatggcggcatatctggcgcgttgccggcctttatgccaacgtcagtattttcgatgttcaagatgccgaagaattgcatcaaatattaatgggattgccgctatatccctttatggcgataaaagtggaagccctctgtcgtcatccgtcatcaattcgcgatgacgatcgctaataataatatctgacctcacgccggtattaccggcgtataccctgcaaaatataagagagaaccagtatgagtaatgtattcgtacaacaaccagctattcagaaattattacgcgacagtgccggattagatgttgccggcggcgatgaacgttttaaggcgattattcatcgtctgctggaaaatatctgcacgctcatcgacgactataacgttacggaagaagagttctggcacgcggtaaactatttgcacgagctgggcgggcgtcaggaggcggcgctgctggcggcgggtctgggactggagcatttcctcgatctgcgccaggacgccatcgacgcggcagcgcatcgggaaaccggcaccccgcgcaccatcgaagggccgctgtacgtggctaatgcgccgctggcggaggggcacgcccgcatggatgatggcgccgacgccggagaagtgatgtggctgcacggtgaagtcaaagacaccgaaggtcggccagtggccaacgctattgttgatatctggcacgccaacaccctcggaaattattccttcttcgacccaggccagagtgagtacaacctgcgccggcggatccgcaccggcgccgatggccgctacagcgtgcgcagcatcatgccctccggctacggctgcccgccggatggcccaacccagaaactgctggacagactgggtcgccacggcaaccgtccggcgcacattcactttttcgtctccgcgccgggtcataaacatctgaccagccagattaacctcaatggcgataaatacctgtgggacgattttgcctttgccacccgcgacggcctgattgccgatccggtaaaagtgaccgaccgcgagatcatcgcgcagcgcaatcttgagggagagcacaccgaggtttgttttgatttcaccctgtgtaaagcgctgagcgccgacgaagagcagcgtgggatccgcgtgcgcgccaaagagtaagcggcattatcggccccgggcacgctactgcccgggccagatattgcactcgaaaacgaagaattcaccctgtttctttcatcctgaatcctgcaggagggaccgactcatgcaaaaaacgctctcgacgctcaaagacaaaatcaataatgccttagttgtcgaccgtgaaaatcatatttaccgctgccatcgttctatatttaccgacccgcagctgtttgaatttgaaatgaagcatattttcgaaggtaactgggtatttctcgctcatgaaagtcaaattccccagccgggtgattattataccctgacgctgggacggcagccggttattattacccgcgataaaaagaatgagctgcacgcgctaattaacagctgcgcccaccgcggcgccatgttatgtcgacgcaaaaccgggaataaaaattcgtttacctgtccgtttcacggctggaccttcagcaataacggcaaattattaaaagccaaagatgagagcaccggcggctatccgccgagctttaaacaagacggctcccacgacctgcaaaaattgccgcgttttcagtcttaccgcggtttcttattcggtagcctcaaggccgacgtgcagccgctggaggcctatctcggagaaacctgcaagattatcgacctgatcgtcgaccaggcgccggaggggctcgaggtacttaagggttcgtcgagctatgtatatgagggcaactggaaactgggcgcggaaaacggcgccgatggctatcacgtcagcgtggtccactggaactacgcctcaaccatgtcacgtcgcaactatgaagcggaagggacgcacgcggtggatgccaacggttggtcaaaaagcctcggcggcggctatggatttgataacggccatatgctgttgtggacccgggcgctcaacccggaagtgcgcccggtctatgcccaccgcgaacggctgcaggtggaatttggcgaacgccgtgccgaccagatggtcaacgaaacccgcaacctgtgcctgtaccccaatgtctacctgatggatcagttctcgacgcaaatccgcgtaatccgccccattgcggtggataaaaccgaagtcaccatctggtgctttgcgccgaaaggggaatccgaccaggccagagcgctgcgaatccgccagtacgaggatttctttaacgtcagtgggatggggacgccggacgacctcgaagagttcagcgcctgtcagcgcggctatctcggcgaaaatctgccatggagcgacctcagccgcggcgcgctgcgctgggtcgatggcgcggatgagcatgcgcaacatgccggcttttcgccgcggttaagcggggtgaaatcggaggacgaagcgctgtacatcgcccatcaccaccactggcagacgctgatgctggcggccattgaacaggaacaacagcgttacgaccagtccattacccagcgtgtggaggtggcctgatgcttaacctcgaacaggttcgccagtttctttactacgaagcccgtctgctggacgatcgtcagtgggacgaatggctcagctgctacagcccgcaggtggtctactggatgccggcgtggggcgacgatgaccagctgacccgcgacccgcaaaaagagatttcgcttatctactaccccaaccgcgaagggctggaggatcgcgtctaccgcattaaaaccgaacgttccggcgccagcacgccagagccgcgcaccacccacatcatcagcaacgttgagctgctgggcgaaagcgacgagggtctggaggtgcgttacagctgggtcacctggagccatcgctatcagcacactgatgcctattttggctctacctgctgcacgctaatcgaacaggacggcagaccgcagatcgtccgcaaaaccgtgcgcctgaataacgattatatccgtcaggtgattgacgtttaccacatttaagaggcgcttatgaccttcaatattgctcttaattttgaggacggcgtaacccgttttattcagtgcaatgccggagagaaagtcctggatgccgcctatcgccagaaggtgaatctgccgatggattgctcggacggcgtttgcggtacctgcaaatgccactgcgccagcggtgagtacgacctgggtgaagattatctcgacgaggcgttaagcgacgacgaagcgcaggcccgccaggtgctgacctgtcagatggtcccgaccagcgactgcgtgatcgatgtgccggtggccgccgcgcagtgtaaaaccgcgctgaccaacaccggggcgcaggtacgacaggtgaatttactgtccgataccgccatcgaactggtggtcgccctcgatgagccgctggccttcctgccggggcagtacgtcaacattcaggtgccgggcacgcctcatgtccgcgtctactcattcagctcgcaaccgggttccctcgaagggcgttttctgatccgtaacgtgcctggcgggatgatgagccagtggttaacccagcgggcgcggcccggcgatcgtcttaccctcagcggcccgatgggcagcttctatctgcgccacggcgaacgtccgctgctgatgctggcgggcggtaccggcctggcgccgctgctctccatgctccataccctgcagacacagggcagccagcgtccggtgatgctgctgtacggtgttactcgtgactgcgatctggtgaaaaccgacgcgctggatacctttattcaacagctgacggggtatcgttggctaccggtggtggccgatgaaaacagcacttgcccgcagcgcggctttgtcaccgaccatctcgacgacgcgatgctgaacaacggcgacgtggacatctatctctgcggcccgccgccgatggttaacgcggttgccacggcgttgcgcgaccgcgggatcaccccggcggggttctggtatgagaaatttatcgccagccagagcgcggcggcataaggagacaaaatgcgttttaccgataaagtcgtcgtcatcaccggcgcggcgcagggcattggccgccagacggcggagcaggcggctgcagaaggcgcggctctgctgctcatcgatcgctcgtcatacgtccatgagctggcggcgacgctggcgcaatccggctgtctggtgctggcgctggaggcggatctggaagcgtgggaaagtaccgagcaggcgtttgccgccggggtcgctcattttggccgtatcgacgtgctgatcaacaacgttgggggcaccatctgggcgcgcccctttgccgaataccagccggagcagattgagaaagagatccgccgctcgctgttccccacgctgtggggctgccgcgcggcgctgccatggatgctgaagcagggcaaaggcagcatcgtcaacatttcatcggtggcgacggcgggagtgaatcgggtgccgtactcggcggcgaaaggcggcgttaacgcgctgacccggtcgattgccatggagtacagcggtagcggtattcggattaacgccgtggccccgggcgggaccgaggcgccgccgcgcctgacgccgcgtaacgaagagcagccgagcgagcaggaaaaggcgtggtatcagcaggtcgtcgatcagacggtggcgagcagtctgctgcaccggtacggcacgctggcggaacaggcgaatgcgatcctgtttctcgccagcgatgaggccagctatatcaccggcgtgacgctgccggtagccggaggcgatctcggctaacggcgggtggcgtaccagcagagcagggagccgagacataccatcccggccccctgccagaaggaccacgacagggtcgcactcagcaggatcgccgccagcgcagaggagagcaccggcgtgaagtaggaggccgccgccagtaggctgacgttgccgtgcaggatgccaacgttccacgccgcgtaggccagccccagcgccacggagaccgtcatcaccttaatgaccaccggccagctaaacagcatcggcggctggtcgctggcgagaaatttcagccatagcgtcagggcggttaacaggacgaacagcgtaatggcgtttttaccgcgggcatatttggccgtcaccgtgcagtaggcggcccagataaacgccccgacaaaggccagcagatagctaagcgggctggaaatgacgttactgataatctcatcgggctgtagcccatgctcaccgcccaacacccagccaacgcccagcagggcgagaatcaggccggggatcaccagccagctgcttttctggccattaaagagaatggcgaataaaatcgtcaggctgggccacaggtaattgaccatccccacctcaatggcctgctggcggctggcggcatagcccagcgacagcgcgaggcagatttcatagctgacaaacagcacgctgccggccagcagatagcgacgcgggatctggcgcaggttggggaagccgacggtaaagatcagcagcaggccgctaaggctgtaaatcatcgccgcgccgccgaccgctcccagtccttcgctgacgccgcgaatcaatccgaccatcgtgctccataagataatggcggtgaagccgatcgtcgtggctctctttttctccatgcttttcctgatggttacgcaaatgcagccggcatatatatcatctttttatcggtgaggggcgaaattttccgccgttgctaacccttagggattagcgaaaatggccagggctggcgattaagggggcgaaggttttcctccttgatttgacgcaaattttcccgggattttgctgttagtttcctccgcgcgatgaatcaacatcctgcatggaggaatgcaatggacgtcagccgcagaaagttctttaagatctgcgcaggcggtatggccggaactaccgccgccgccctgggctttgcccctaaaatggcgctggctcaggcacgcaatttcaaattgctgcgtgcgaaagagatccgcaacacctgcacttactgctccgtgggctgcgggctattaatgtatagcctcggcgacggtgcgaaaaacgccaaagaagcgatctaccatatcgaaggggacccggaccatccggtgagccgcggcgcgctgtgcccgaaaggggcaggcctgctggactatgtccacagcgaaaaccgtctgcgttatccgcaataccgcgccccgggctcggataaatggcagcgcatctcgtgggatgaagcctttaaccgcatcgcccgactgatgaaagccgaccgcgacgccaactttattgaaaagaacgaacagggcgtgacggttaaccgctggctttccaccggcatgctgtgcgcctcggcggcaagcaatgagaccggcatgctaacgcaaaaatttgtgcgatcgctgggtatgctggcggtagacaaccaggcgcgcgtctgacacggaccaacggtagcaagtcttgctccaacatttggtcgcggtgcgatgaccaaccactgggtggatatcaaaaacgccaacgtcgtggtggtgatgggcggtaacgccgccgaagcgcatccggtgggtttccgctgggcgatggaggcgaaaaacaataacaacgccacgctgatcgtcgtcgacccgcgctttacgcgcaccgcgtcggtggccgatatctatgcgccgattcgttccggtactgacattaccttcctgtcgggcgtgctgctgtacctgatcgaaaataacaagatcaatgccgagtacgttaagcattacaccaatgccagcctgctggtgcgggatgattttgccttcgaagaggggctgttcagcggctacgatgcggaaaaacgccagtacgataaatcgtcctggaactaccagttcgatgaaaacggctacgccaaacgcgatgaaacgctcacccacccgcgctgcgtgtggaatctgctgaagcagcacgtttcccgttacacgcccgaggtggtcgaaaacatctgcggtacgccgaaagcggacttccttaaagtgtgcgacgtgctggcctcaaccagcgccgcggaccgcaccaccaccttcctgtatgccctgggctggacgcagcacaccgtcggcgcgcagaacatccgcaccatggcgatgatccagctgctgctcggcaatatggggatggccggcggcggcgtcaacgccctgcgcggccactctaatattcaggggctgaccgatttgggcctgctgtcgaccagtctgccgggctatttgacgctgccatcggacaaacagaccgatctgcaaagctacctcagcgccaacacgccgaaggcgaccctgcccgagcaggtgaactactggagcaactacccgaaattcttcgttagcctgatgaaatccttctacggcgaggcggcgcaaaaagagaacgactggggctttgagtggttaccgaagtgggaccaggcttacgacgttatcaaatacttcaacatgatggataacggcaacgtcaccggctatatctgccagggctttaacccggttgcctccttcccggacaaaaacaaagtggttcgcagcctcagcaagctgaaatatatggtggttatcgacccgctggtgaccgaaacctcgaccttctggcagaaccacggcgagtctaatgatgtcgacccgtcggcgattcagaccgaagtcttccgtctgccgtcgacctgctttgccgaagaggacggttcgatcgccaactccggccgctggctgcagtggcactggaaaggtcaggatgccccaggtgaagcgcgcaatgatggcgaaatccttgccgggatttaccatcgcctgcgcgaactgtaccgcaccgaaggcgggaagggcgcggaacccctgctgaagatgagctggcgctacaagcagccggaccatccggaatcggaagaggtggcaaaagagaacaacggctacgcgctggcggatctctacgatcaaaatggcactctgctggcgaaaaaaggccaactgctcaatagcttcgcgctgctgcgcgatgacggcagcaccgcgtcgtcttgctggatctataccggcagctggaccgagcagggtaaccagatggcgaatcgtgataacgccgatccttcgggcctgggcaatacgctgggatgggcctgggcgtggccgctcaatcgtcgggtgctgtacaaccgcgcttcggccgatatcaacggcaagccctgggatgcgaagcggatgctgatccagtggaacggcagcaagtgggtcgggaatgatattccggacttcaataccgcgccgccagggagcaacaccgggccgtttatcatgcagcaggaggggctgggtcgcctgtttgcgctcgataaactggcggaagggccgttcccggagcactacgagccgatggaaaccccgcttggcactaacccgctgcacccgaaggtggtctccagcccggtggtgcggttgtatgaagaggacgccattcgcttaggtaagaaggataaattcccgtatgtcgggaccacctatcgtctgaccgagcatttccacacctggaccaagcatgcgttgctcaattccatcgcgcagccggaacagtttgtcgaaatcagcgaagggctggcgaaaagcaaaggtatcgctaacggcgattgggtgaaagtcagcagcaagcgcggcttcattcgcgcggttgccgtggtgactcgccgactgcgcacgctgaacgtcaacggccagcaggtggagaccgtcgggatcccgctgcactggggttttgaaggcgtggcccgcaaaggctacatcgccaacaccctgacgcctaacgttggcgattccaactcgcaaacgccggaatacaaggcgttcctggtcaacatcgagaaagcgtaaggagcgattcaatggcgatggaaacccaagacattattaaacgctctgcgaccaacccgatcacccccgcgccgcgcgcgcgggactataaagcggaagtcgccaagcttatcgatgtctcctcctgcgtgggctgtaaagcctgccaggtggcctgttccgagtggaatgacatccgcgatgacgtggggcactgcgtcggggtgtacgacaacccggcggatctcagcgccaaatcctggacggtaatgcgctttagcgagaccgaacagaacggcaaactggagtggcttatccgcaaggatggctgtatgcactgcgcagagccgggctgcctgaaggcctgcccatccgccggggcgattattcagtacgccaacggcatcgtcgatttccagcaggaaaactgcatcggctgcggctactgcattgcggggtgtccgtttaacgtcccgcgcctcaataaagaggataaccgggtctataaatgcaccctgtgcgtggatcgggtcagcgtcggccaggaaccggcctgcgtgaaaacctgtcctaccggcgcgatccacttcggtacgaagaaagagatgctggaggtggccgaggagcgggtggctaagcttaaaaaacgcggttatgccaacgccgggatttacaacccgccgggcgtcggcggcacccacgtgatgtacgtcctgcatcatgccgaccagccggagctgtatcacaagctgccgaaggaaccgcagatcgataccagtatcagtctgtggaagggggcgctgaaaccgctggcggcggcgggctttatcgccaccttcgccgggctgatttaccactacatcggtatcgggccgaacaaggaagttgatgacgatgaggaggaacatgatgaataaatcgaaaatgatagtgcgcaccaaatttatcgaccgcgcctgtcactggacggtggttatctgtttcttcctcgtggcgctgtcggggatttcgtttttcttcccgacgctacaatggctaacggaaaccttcggcacgccgcagatgggacgtattctgcacccgttctttggggtgctgatttttgtcgcgctgatgtttatgttcgtacgctttgtccaccacaacatccctgataaacaggatattccgtggctgaaaggcatcgtcgaggtgctgaaaggcaacgagcataaggtggcgcgcgtcggtaagtataacgccgggcagaagatgatgttctggaccatcatgagcatgatatttgtgctgctggtgaccggggtgattatctggcgcccatattttgcggaatatttcccgatgcaggtgattcgctatagcctgctgattcatgcgacgtcggccatcattctgatccacgccatccttatccatatgtatatggcgttctgggtgaaggggtcgattaagggaatgattgaaggcaaggtgagccgccgctgggcgaagaaacaccacccgcgctggtatcgcgatgtcgaacgcctggaggcgatgaaagagagtcgtgaagggatgaagtaagccttcacggcgcgaaacccgctccgaggatgtcggagcgggttcccggcagtcagcagttcgtgataagagtatcgattgaatcgataacgccctggcgcgcatgactcagattgcagacgaaatcctgtggcgggatccgtttattatttaagttactgatcattggcgtacaaagtaaaaagctgtcaaattttatatttatccttggtacgacatgctgatgccagcgtggtaactgttgtggtcgaattaaaggaataatgactctcgtggccaggtctgcataataatcattctgcacgatcatataatatggcagggttttatttgtctgagcagaacaatttcgataaacattgaattgtccaagcatcatagcaccctgaaaaattcatcatcagtaagagtgcctccttttgcaataaattcattcattgcggcaatgaattccttgtgctgtcgctgtttatctgcttctcgtaaatccttacctggctgttctgacgccttctggacgggtacgtcagtgggtcttttacgtagcgtattacttttcatcataggctccttgcggttggttctgtgattatttactttacccactaaaaaataaataccagcagtaagtttaatatttattttgcgagacagcttccagagggaagtaacagcctgaaatattcatggttatagtaataaacctggcgctggcattaaccagcgcgacgggaaataatcaaaacttctctggaatgaagcggaaaggaaaattagtctgtttcattttgccaattttgcgcttcggcagcgtcacaggctccaccggtaaagcttcataggggatctgcgacagcagatgggtgatgatattcagacgcacgcgctttttatcctccgagcgggcgacgaaccacggcgcccaggcggtatcggtggcggcgaacatggcgtcgcgggcagcggtatattcatcccagcggttgaaagacttaatgtccatcggcgagagcttccagattttacgcccgtcgtcgatgcgatcccgcagacggcgctcctgctcctgcggagagacctccagccagtacttgagcagaataatgcccgattcgaccatgccgcgctccaccatcggcgcgccgtcgaggaacttctgcacctcctccggcgtacaaaagcccatcacccgttcgacgccggcgcggttataccagctgcgatcgaaaatcacgatttcgccggccgccgggagatgcttgatatagcgctgaaagtaaagctggcttttttcgcgctcggtgggcgagggtaaggcgacgacccggaagatacgcgggctgacgcgctcggtgatggccttaatggtgccgcctttcccggcgccgtcccggccttcaaagacaatgcacactttcagtcctttgtgtaccacccagcgctgcagtttcaccagctcaacgtggagtttgcgcagcgctttctcgtacgctttgttgtcgagcggcgcgatttttgccgccgtgtcgaccggattaccgcttttcttgttgcccatcgccatgctccgtgttgccgaggtatccctttgaagtgtaatcctcccccggcgaggcggtggaaaattattcgccgggttttcccgccaggatgacttccagtcccacccgctgcccccacgacagctccagggtgttaccgtccgggtcggcaaagaaagcgaaatagcccaccggatcgcccagctgctccggctcccggcgtaaaacaccttcccgccgtgcgagggccactttctcatcgatctcggcctgggtggcgcaggcgacgccgagatggccgaacggtcccagcggcgtatcggccggatcgtcactttgcaccagcaccagggcgaaaggccgggtgcggtcgctgagccatgccactttccgcgccgaggggaggtcgggctcgcgctggtgaatgacggtcatcgcggtatagcgggtataaaaatcgatgctgctggccagacagcggacggtaaaggcgacatgagtaaaaccgacatcaacactttgcatggataattctcccaaggtgaacgatgatttgactttacaacctcaagttaacttgagatcaatgaggtgtttatttctttgagcccactgattttgatagggggattgttactgcgaaaccacgccgccggtatgccacgcggctggggaacatgaacgaatcaggctgttgtatggaggaaactgccgtcgggcgtttttagctggtgtgtcggggcgggatggtaaataatgccggccggctctcaatacccctataagatgtatgaaaaaaacgattttttcactggcgctgggcacctttggacttggcatggcggagtttggcattatgggcgtgctgccggatatggcgcacgatgtcggaatatccatacccgccgccggcaatatgattgcctggtatgccttcggcgtggtgatcggcgcgccgatcatggcgctgctctccagccggttttccctgaaatcggtgatgctgttcctggctggcctgtgtattctcggcaataccctgtttaccttctccagtagctacgccatgctggcgcttggccggctggtttccgggtttccccacggggcgttctttggcgtcggcgcgattatcctgtcgaaaatcgcgccgccggggaaggtgaccgccgcggtggcggggatgattggcggcatgacgatcgctaacctggtgggcgtcccgggcggcacctggcttgggcatcacttcagctggcgctatacctttgcgcttatcgcggtatttaacgtggcggtatttctggcgatcttctgctgggtgcccacgctttatgaccgggccagcacgcggctgcgcgagcagttccgttttctggcctccccggcgccgtggctgattttcgccgccaccatgttcggtaacgccggcgtgtttgcatggttcagctatatcaagccctttatgctcaacgtctccggctttgctgaaagcaagatgatgctgattatgatgctggcggggctgggaatggtggtcggcaatctgttcagcggcaaaatttccgggcgctacagcccgctgcgcattgcggccatgaccgacggggtcattgccgtgacgctgctgctgatctttgccttcggtgaacagaaagtcgcttcgctggcgctggcgtttatctgctgcgcgggactattcgccctgtcagcgccgctgcagatcctgctgctgcagaacgccaaaggcggcgagatgctgggggcggccgggggacagatcgcctttaacctcggcagcgccatcggcgccttctgcggcggaatgatgatcgcccagggctttggctggaacagcgtggcgctccccgccgccgcgctgtcgtttctggcgatgagcgccttgctcatctatggctgccatcagcggcgacaagcttactaacgacgcctactcacgccagggttcgcccagggtaagcatcaggcggttggcccaggcgaaaaaggccgcggactgcagcagatccagctgggccagagtatctaagccctgctcatcaagcgccgccagatgatcggcgtttaatgcgggtggcgtcaccgatagcgcggcggcggcgtcgatttccgcctgccagcgcggcgattgcccgtcgcgcagatcctctcccggcgtcaccgccagcagcgtgtcgacggcggtctcgtccttcgccagctgcgccgctttgcgggcatgcaccgaggcgcagtaaatacagccgttgattttactggcgaccgtggcggccagctcgcgttcggcgcgcggcaatcctcccgcggtatagaaaatgcccttatcggtcagggtccgctgctccagcaccggctggttgcgcgccagcaggcgaaagtagggggagtcgctatggccatatttggccagaatcgcctgttcttcagcgttgaattccgccagcggtttatcggccagccagggttcccagtgcagctcgtcgcgggtgaagcgaaccggggccgctttgccgctctgcgcgtacggggtggtatgccagtatccggcgaccagcggcgtatctgcgctgacgatgggcttatggttgagcgcccgcaggcccagcagcagtcggctctggaagctgacaaaggctaccagctgcgccagggtgacgatgccccgcaggctccagcccgcgctggttaaggtgtgcagcgcgccgggagtggcttcaacgggggtgaaggtgagcaggcgggcaaaggccagcgccgggaccagacgatcggtggtcggatcggcgaggccgaaaccggcatagtgcgccgccagcgcgtccgcctggtgcagtttcgccacctttgcggccaccgcgaagcgttcatcaagaggaaagtcagcgtcctgctggcggaacagcacttcataacttccctgggcgtgacgggtggcggcatcgcggacggcgcgcgcctgatcgagcggggaaccgggggcgatctccgccagttcggccagaatatcctgactcagcgtcatggggactccttatctgatgtggggggcaatatgctgagcgatcagctcaatggaacgcagcgtatcccggtgcgaaggctcgaccgagtgcacctgaaacgaaatatcggtggcgcgggccagcacgctgtcctgcgccagggaggcaataacatgctcaggatcgccaacgtgggcatccagctgttgcagatagtcggtgacactgtcaccttctatcgtatgacccgccgcccggtgctgagttgcctgcttgcgcagaccgggctcggcgacctgcagggcgtgggcgtgactgtcggcgacgaaggcggtgcgcgaggcgaggatcctcggtgcaacgccgtccggcagcgccgccaggtaggcgtcgatgatcgggttctgaatggcgtccagcggcaggcgtggctcgccggacggccgtggctgagtgcgggacagcatcaacccgtgtcccgcctgaccggcgcggatagcgccctccgccgagaaggtggcgatccagatacgctccgccagctgcggcgccggcggatagagacggttgtccgggtggctcagcgtgtcgccgcgccaggcgctatggatcaggtgcagatggtcggcaaacgccgccccgcgctgctcgctggtcaggccgaagggcagaaacgaggttggcgtgccgccggagccaaaccccacctccagacgtccgtcggtgagtaaatccagtaccgctgcgtcttcggcgacgcgcagcggattttccatcggcagagtgataatcgccgtgccgagacggatccggtcggtctgcgccgcgacgtgggcgagaaacaccagcggtgaaggcaggccgccttcctgttcatgaaaatggtgctgggcaatccatgcgctgtcgaagcccaaacgctccgcgtggcggatctgttcggccgccagccggtagcgcgtttgcgcggagccctgatcgagcagacgggtaaaaaaaccgaggcgttttggcattatgcgttctccgtgtgggcctgtgctaagcgggaggaaacctgtggaatggcggcgatcagttcgcgggtgtaggcctgctgcggggcggcgaacaggcggtttacgtcgccatgctccaccacctggccggcgcgcagaaccgtgacgctgtcggcgatccgcctgaccgtcgccagatcgtgggtaatgaacaggtagctcagacccagctgctgctgtagctgctgcagcagggcgaggatctgcgcctgaacggtgacgtcgagcgccgaagtcgcttcgtcaaggaccagtatcgccggctcgaggatcagcgcccgggcaatcgccacccgctggcgctggccgccggaaagctcccgcggcgtacgcgacagcagctcgggggccagggccacccgggcggcaacgctctccacacgctggcgacgcgtcgccgcgctgaggcgctcaaagttttttaacggctcttcgataatcgcaaacagcgtctggcgcgggtcgagcgaagcgaaggggttctggtagacaaactggatcttgcgccgcagctgacgctgtgcctcgcggctgagatgcccggcgtcaataccgtcgatggtgacctgtccggcgtcggcgcgctcaaagcccagcaggatccgcgccagggtggttttcccggagccggattcgcccaccagcgcatgggtgctgccgcgtctgacctcaaagctgacgctgtcgagcgcctgcagcgcctgtttgcccagcgagaagcgtttgctgatcccctccacgcgaatggccggcgtggccagcggccggtgacgcgccgctgttagcctcaacggcgcatcctgcaggtcgtggagcagctggcgggtgtaaggatgctgcggacgctggacaatcgcctcggtggcgccttgttcctgaatctctccctggcgaaacaccatgatccggtcggcgcgttcggcggccagcgccagatcgtgggtgacaaacagcacggcggtaccagactcgcgacgcaggatatcgagcaggtcgagaatgcgcttctgcaccgtgacgtcgagggcgctggtgggctcgtcagcaataatcagatccggctgcagggcaatggcgatggctatcagcacccgctgtttcatcccgccagacagctgatgcggatactggtcaaaacgctgttccgggtggctgagaccgactttagcgagcaggttaagaacctgctgtcggcgctcagcggcggagagggactgatgcagccgcaggatctcttccacctgctgaccaatggtttttaccgggttgagcgaattaccgggatcctgcgggaccaggctgatgctcactccgcgcaggcggttcaggcgtttatccgaccagtcgctaatcacttcgccattgaggacaatccgcccggcatcccggcgggcattatccgccagcaggccgataatggcctgcgcggtggtggttttccccgagccggattctccgacgaaggccagcatttcgccgcgctggatggaaaagctgatgttgtgcaccacctcgcgccattcgccccgcgagcggtagctgatgcgtagatcttcaacggacaaaacggtcatgggtgtgctccactccactggcggctaagacgattggcggcaaggaccacggcgaccacggcgaggccggggaaggtggtcagccaccaggcggttgacaggtaattgcgaccttcggcgatcagtagtccccactccgggaccggcggcggagtgccgtagccgaggaagctgagggtggccagggccaacatcgcctgaccgaactgcagcgtcgcgaaagcaagcaccgcagtgagcgagttgggcagaatatggcgccagaagacggcgaaaaaagtgccgccgctgccccgggccgcctcgacgtaatcgctgtggcgcacgcgcaccacttctgctcgcgccaggcgcgcgaagctggcgatagccgcgacgccaaccgccaccgccgcattcaccgtgccgaaacccagcagaataatcaccgtgagctgcagcagcagggaggggatggccagcaggacatcgaccaggcgcatgatggtggattccacgcgtccggccagcgccccggcgagggtgccaagggtggtacccaccaccaggccgatggcgacggcgatcagcgctgccgacagggaatgcaccgcgccgtaaaccacccgcgtccacaggtcgcgccccagctggtcggtacccagccagtagtgcgcctgcggcgccaggcgctgagcgccggggatcccctccagcgggttagcggaggtaaaccactgtggggcaatggccattaacagggcggcgatcatcaccgcccacgccagccacaggccaggctgcaggcgcactctacgccactccgggcggcggcgaaccgcgatggcataatcgaccaggctcatttcgcacctccggtctgtaaatggagtcggggatccagtcgcggcatgaccaggtcgaccagcaggttgatcaggacgaaaccgagggcggagatcatcaccaccgcctgtagtacggcgatatcctggttattgaccgcctgctgggtcagctggccgaggccgctgcggccgaagacggtctcggtgatcagcgccccggcaatcagttcgccgagcagcagcccggcaatattcagcgccggcagcagggcattccccatcacatggcgccagaggacgcccgtttcgctcatgcccttggcgcgggcgaccgcgacgaagggctgaaccgccacctgatccatgctgcgcatcaggatctgcgccagcggggcggaaatgggcagtgcgacggcgataaccggtaaaatcagtccttccagtgggccggggttgattaccgggatccagcgcaactgaaacgagaagagctggatcagggcgatacccaaccaaaaggtaggtagagagataaacagcaccggtagcgactgcagaaaattgctcagccagcgcagccccggcagccgcgaggcgaaagcgagggcgaacgccagcgccacggccagcaggaaggccggcagcgcgaggcttaaggtatccggcaggttgctggcaatcagactactgaccgctagccccgcctgcagagaatagccgaagtcgccgtgcagcatcgccagcagcgtgtgcaggtactggcgccacagtgggctatcggcgccgtaggccagccgcatctccgcaatttgcgccgggctcaggccgaggtccgggttctgaaacttgatcagcaccgcatcccccggcaggacctgcagcaggaaaaaggtgagggtaaaggccgcccacaggaccagcagcccctggccgaatcgtcgcagaagataagcgctcataaccggcctcttagtgcttgtccagccacgcgccgtagaacgacggacgaccgacggcctcgaagctgacgcctttgacccacggcgcgccggcgaacacctgcggctcttcgaaaatagggatcacataggcgttatcgatcagatagcgctgggcgtcgccggttaactgcaagcgctgctgcggctctaccgccgcggagataccggtcagcaggtcattgagcttatcatcgcggaagcgctgcactttatcgctggagccgcctttctgcagcagcgcatcgcggttgttggggaagaacatacttttcaccacatccgggtcggcgcgccccacttctgagacggtgagcggggttttctgcgggtcgaggttatccagcgtacggctaccggcatccccggctttgaccgtcaacgccacacccacctggcgccactgctgggcgatcagctgcagcacttccttattttgcggctgcggcagcgactcatagacggtcagcgccagccgctgaccgtctttgctgcgaataccgtcggcggcgggcttccagccggcgtcatccagcaactgccgggctttggcctggtcgaaggtgagtttatcgctgagattgacatagccggcggcagagctggccagcacggaggtggcttgcgggtagttagcggagaacagcgtctccaccacctgcctggcgttggtggcatggagcagggcctgacgcacccgcaggtcggcgaccagtgggttatccgggcggaagctcaggctgtcgttgaccccgcgggtaggggcagcgtagatcttaaatccctgatcggtagcctgcttttcatcgtaggcctgcacctggcgaataaagcccgcctgacctgccagcagcgcgccgatacgcacgctgtcttccggcgtcacaatataggtgatgccgtcgaggttagcgggcccctgctgggcaatgtttttcggcccccactggtaatccttgcgcgccaccagcgtcagctcgcggcctggtttttcatcctgcacgacgaaggggccggagccgataatatgtcgggcatcgcccagctcttcaaaattacgctgcagggtgctgagagataccagaccggagccgatggtggcggttccctgcaggaagcccggcgacggcttgttgaagtagaattttaccgtcagcgggtcgatcacttcgctgcgctggtagttattgatgacctccgagacgggcagacgatgggctttatctcccagaccataggtatcgaagtttttggcgacggcggcggcgtccagcggtgtgccatctgagaaagtgacccctttgcgcaggtggaaggtgtactcggttttatcggcattgctggtccagctctcggcgatccacggctcaatctccagcgttttcgggttctgccaggtgagcttgtcggttatctgattgagaatcccgccattcgggtaaaagccgccggcgggcggatagagattggtgtgcggttgctgctccagataaattaaggtgccgcctttaaccggcgtgtcggcggcccagacggaaaaggcgccggtgagaaacagcgcggccagcgcgggcaggcgaaaatgacgatgcatggtgaattcctttgttatctattgtgttgccatcatcgggcgcggctaaaaacaaaggaaccaaggaattgcgctaagcatttgcggaaattgcatttacttcccgggttgggaagcgagaggacgtgccagggggatcgcctctcccggacgggagaggcgcgggtgattagctacgcagatcgataaccatacggccgcggatctgaccttgctccatctctttgaagatagcattgatatcttccagcggacgcagggtgactttcggcaccactttgccttcggcggcaaactggaaggcttccaccagatcctgacgggtgccgaccagcgaaccgaccacttcgatgccgtccagcaccagacgcggaatatcgaggctcatcgcctccggcggcaggcccaccgcaaccacgcggccaccggcgcgaacggcatccaccgccgagttaaaggccgctttagccaccgcggttactaccgcagcgtgggcgccgccggttttttcctgaatcactttcgccgcatcttcattgcgggagttgatggtcaggtcggcgcccatcgaggccgccagctccagctgtccgtcgttgacgtcgatagcgatcactttggcgttaaacacattcttcgcatactgcagcgcgaggttacccagcccgccgaggccgtagatggcgatccactggcccggtttgatgtgggagaccttgaccgctttgtaggtggtgacgcccgcgcaggtgatgctgctggcggcggcggagtcgaggccgtccggaacttttaccgcgtagttggcggtgacgatgcactcttccgccatgccgccatcgacggtatagccggcgtttttcaccgagcggcagagcgtctcgttgccgctgttacagtaatcgcagtggccgcagccttcgaagaaccacgccacgctggcgcggtcgcccggcttcagggaggtgacgcccgggccgactttttgtaccaccccgatcccttcatggccgagaatgacgccggttttatcgccaaaatcgccgtttttcacgtgcaggtcagtatgacacacgccgcagcattccattttcaacagcgcttcgccgtattccagcgggcgcagcgttttttccgtgacgttaacctgatggtcgtgggtaacaacagctgccttcatgcctgtctccttgtgggggaattgattaacttaattaatgcaatagtacccaataaggattagacgctgagcggtaaaatacaaggcgcttagtacagaatgtggctttttgctacagggatagcacaaaattcagacaacatcgctatatttggtaggtaataatattgacgctgaatggtcatgtttttgtcatcactcgaatctattgttttgcgcatcaatttcttataacaacagagtgatacaacaatgcatctggtaaaaaccatcctcaccgccggtctgcttttgtccgccgccgcccaggcccacaatgtgctggaatttccccagccggaaaacaacccggaagaattttacgccgtcactgagatcccgacgggcgggatcattaagtacgaaaccgatgctaaaacggggtttatcgtcgccgaccgctttcagtcgatgccggtggcctacccggcgaactacggctcgctgacccagtcgctggccggggatggcgacccgctggacgtggtgttttatacccgcgcgccgatggccccgggcacgctgattaagctgcgggcaattggtgtgctgaagatgatagacggcggtgagaaagacgacaaaatcatcgccgtaccggccagtaaaattgacccgacctacgacgacatcaagaccatctccgatctgccgaaaatagaacagcagcggctggaggccttcttccgggtctataaagaactgccggaggggcgtaaaaaggtcgagctggccggctttaatgacgccgcggccgcgaagcaggagatcaaatcggcctgggaggcctggaaggcgaagaacccgcaataatattcatcgcgggcgctgtccggcgcccgcggcattcgctttcacgatccctgtggcggcaaaatcacacgtcacacgtcacacgtcacacgacaacgcttatcccaccatattgcatcttgacgcaggatgaaggtgatggttgtattgtacaaccatttcattttctggacccgccgctatgcctgatacccccttaatccaacagattcgtaccgcctcgcggttaatggtgcgcgagctgggctttatgagcaccacgctggccgccacccattattcaccttcggcggtgcacaccctgcttgaggtatcgatgaggggggagatgacggccgcgcagctggtcacgttgctgggactggaaaaatcaagcgtcagccggatggtctctcgtctgctggcggctggtgagctggaggagcgtccttgcgcggaggatgcgcgcgcgaaatcactcgccctgacggcaaaggggcacgatacggtggcgaaaattaacgcctggggtacccgtcaggtggtggaggcgttagaccatctgggtgagacgcagcagcaaactgtcgccactggactggcggcctatgcccgggcgctggcgcagtgtcgggatagcgcgcttgcggatacggctccgcaaatttcgctgatgaccggctaccagccggggatgatcggccggatagcccagatgcacggggagtattacgcccgtcatcatgactttggcgctttttttgaaggcaaggtcgccagcggcgtagcggaatttgccacccggctctcctccccggccaaccagatctggctggcgatccgcgaagggaaaatcgtcggctcgctggctattgatggcgaggacctcggccagcaggaggcgcatttgcgctggttcattctcgatgacagctgccggggaaccggcattggcaggcggctcctcagcgaggcgatggctttctgcgatagtcgccagtttagcgcggtgcagctgtggacctttaaagggctggacgcggcccgcaaactgtatgaatcctttggcttcacgttaatccgcgaatggcagggggagcagtggggaaaggtaatgaccgagcagcagtttacccggtccggaaacatcggctaagggtgttgcgccttagccggtggggggacatggagattacgtcagttggttaagcaggcgggcaatctcctcttgccactgtgcctgcagtgacggcttttgatgttttggcttgcgggccatgtcgtcagccagccactgctccaggtcaatcagccgcgccagcagcgcctcctcatcatcgtcagccccggcgggtgtactctgcaaagcgagccgactgtccggggcgggcgccacggcctgcagacgggcatagacctcctccagactgtgccactccgttagcccggcgctgtcgatcagccagaagcggttacagctttcgctaatcagctggcggtcatgactgaccagcagcacgccgccggggtaatcgcgcagcgtctgcgccagcgccgctttaccctccatatcaagatggttggtgggttcatccagcagcagcagactgtagcgcgccagcgacaggccaacgaacagcagccgcgatcgctcgccgccgctgagggtgctgaccttctggctatgtctcgcccagccaaacccggcggcgatcagcgcccgtttacgggtgtccgccgacggggcaaacggcgtcagggcctcgagcaggctggcctcgtccggcaactgcgccagcgtctggtcatagtagccggggtgcagccggggatgcaggcgcagccccgggagaggcgatgcgttgttcatctgctgccacagcaggcgcagcagggacgatttgccgccgccattacgtcccatgatggccacgcgatcgccgctgcgcaggcgcgccacgccggtggtgaagagggatggctgacccggcgcgggcgagacgggaagggtgtccatctccaaaaggcggtcggccggcagggcgtccccctgtaacaccaggcgccacggcgggccgacgctgagctcggtctgctcgtctttcaggcgggcgacctgcttctccatctgtttggctttgcgggcgagatcttcattgtcatagacccgaccccaggtggccagccgccgggcgctggcgctgacccggtcgatctctttttgctccgccttatgacgtaacgcggcgctttcatcctgctcctgcagtgcctgacgggcagcgctgcagggcaaggcgaagcaatgtagcgtctggtcacggaggatccaactcgcattagttacagcatccagtaaggtgttgtcgtgtgacaccagtacgaagctcccctgccaggtttgcaggaagctttccagccacagcagggtgggcagatcgagatggttgccaggctcatccaacaagagcagatcaggctggcggatcagcgcccgggccagcagcagacgcgtgtgctggccgccgctcagggtggcggtctgctgctccatcaccgccggggtaaagcccatctgcgccagcaggcgttcggccagccagcgctgtgcttcccgcgcgtcggcgggtaatggggccagcaccgcctgcagcagcgactgcgtatgcagcgcctccggcagatgctgttcaacgcgggccatcagacactgaccggcgagcgagacgctgcccgaggtgggcgcgagggtgccctccagcacctgtaacagggtgcttttgccgcaaccgttatggccaatgagaccgatccggtcgcctttcttcagggtgaaggagagggtgttaaacagcggcccaaaggcagtctccacgtggagcgcatgggcagttagtaatgtactcatagtcaacttactcaagagttacaggcatgcaaatgcctcgtcaaaactcgctgacgataacccggtaagccggagagaagggattgcgtgaagtgtcttcgctcaagccatagttatcgcagcacgataccgataacgcttgagctggcgcaattgcctaatgcatgtgaaacaataaacatttcacaatacagcatggggggcctccttttttattcagtcagtgggtgggtggtggcagtgtagtggggaaaggctagcgacgccagtgacaaaactggcaggggggccccgccagctttcacctgcgccgcctttgtctacgacgccgggttggcgcagagggcttatgtgtttgctagaacatgatgggaaaccagcgggcgtggtcgcgggtatattccgtcatcgcctggggatcctttatcgcctggcagggggcgtcgagaatattcggatacgcatccggataccaatcctcttcggttgttaaggtcaaaaagcgagactcacggtgggtttcacaggtataggcgtttttaatattgtcggcttcgcgatatcccctgggatcgcgatattcgatatacactttgtattcagagcgggtaccccgccacgcgcccggctccggtttctgccagcggaccgtctggtagtagcgctcccgctcgccgtagcgatagacaggggtctccccgccgggaatcacgtcgggtctcaggaagaaaaacaccagtcctgccagcaggagtaacaccggtgggagaatgtgggtcagcagccgcggcgcccgacggttaaccagcagcagccacagcagcggcgggatcgtgctgacgataaaagcaaagaggattttcgccggcgtatagagttcatgcacagagacctcgccggctttcgccgcgtaaaacgcctgcttatcgccgaaataccagtactcaccgtgaaaggcgctgatggcgctcaccagcaacagtccgctaaacagccccagccagaggcgtaatatcggctgcaaaaccattttttgctggctcatttacggctcctgatggttttagtgacaagcagctcgtcttcagagaccgtatgcagatcggcaatctgactacactggttggcaaggacctgcggatcgccgttcgggaaccagccctcattgaatgacagggtgtaaaactgggtatgccgctgcacttcacagcgccaggcgcggcgaagattgtttctgtcgataagccagcggggatctttcgcttcaacaaaggtttcatattttgattgcttagcggaatgactacctgaccgggttttcatccagaatatagacgcataataggtattgtgtttaccgtactgaatactggcatcccgacccggggtgacctccgggtggaggaaaataaatatcccggcggcaatcagtaccatcagcggtaatataggatgctgtatcggccgccaggggattttacgtaccgccagcagccagaccagggtaataataaacacgtagagcagggcgaagaaaaatttactcggctcatagatgacgacatccaccagatcgccggtggcgggctgatactgttccgcccgcggggtgagcatccacatatcaccgctgaagaggcacattccggtgatgatggcgataccaccgataagaaacaagacaatacggatcagaatcgcattcgctttattcgcgccaggggttaattttagcatttcacattccgttgtgagggggtgagaaacaactattttgcacagcggagggcgcgcggcaaatgctatccgttttatatttttacgatgaatgaatatgggcgaaaaaaacgtttctgtggcgggagatattattctgacgttattaaaaaccgggccgatatgtcgacccggtgacagtgattaaatcgaggtgcggcgataattgcgatattccggtaaccagaaattatcgctgatcgcttgcagcagcgcttcggcggaggttttcaccgccacgccttgctcctgggccaccttgcccaccgcgaaggcaatcgcccgtgagacggtctggatatccttcagctccggcagcaccggaccttcgccgttgttgaccagcggcgagtgctgcgccagggtttcgctggcagccatcagcatctcgtctgtgacccgcgacgcgccggaggcgatcacccccagtccaatacccgggaagatataggagttattgcactgggcgatgggatactgcttgcctttcacggtaaccggggagaatggactgccggtggcgaccagcgcctcgccgtcggtccagctcaggatattctgcggcgtcgcttccacccgtgaggttgggttggagagcggcatcacgatcggccgcgggcagtgcttgtgcatctcgcggataatctcttccgtgaacagtcccggctgacccgagacgccgatcaggatgttcggcttcacgttgcgcactacgtccagcagggacagcgcctcgctggtggtatcccagctctgcagctgctcacgcttttgcaccagcttgttctggaacggtagcagattaggcatgccgtcggttaacaggccgaagcggtcaaccataaacacgcgctggcgggcctcttcttcactgagtccttcgcggacgatctgggcgataatctgttcagcgataccgcagccggccgaacccgcgccgagaaagacgattttttgctcgctcagctggctaccggcgccgcggctggcggcgatcagcgtcccgacggtcaccgccgcggtgccctgaatatcgtcgttaaacgagcagatttcattgcggtagcggttgagcagcggcatggcgttcttttgcgcaaaatcttcaaactgcagcagcacgtccggccagcgggccttaatcgcctggatcacgtcgtcaacgaactgatagtactcgtcgtcggtaatgcgtggatggcgccagcccatatacagcggatcgtcgagcagctgctggttgtttgttccgacgtccagcacgataggcagggtgtaagccgggctgatgccgccgcaggtggtgtacagcgacagtttaccgatcgggatccccattccgccgatcccctggtcgccgaggccgagaatgcgctcgccatcggtgaccacaatcactttcacgttgtggttcgggacgttctgcaggatgtcgtcaaggttatggcgattctggtaggagataaagacgccgcgggcgcgacgatagatctcggagaaccgttcgcaggccgcgcctaccgtcggggtatagataaccggcatcatctcttcaaggtggttgccgatcaggcgataaaacagggtttcgttggtgtcctggatgttacgcagataaatatgtttgtcgatttcagttttgaatccctgatactggatccaggcgcgttccgcttgctcttcgatagtttcaaccacttccggcagcaggccgagcagattgaaattgctgcgctcttccatactgaaggcgcttcccttgttgagcagggggaattcaagcagaacgggacccgcgtaggggatgtacagggaacggtttttcttatgggtaaattgcatcgcactaactccttgatcatgaccacagtcccggcgcggcgataagcgaagggcgggtggaaagcagcgggcagagtatagagcagaaggtcttcaagcgggtaaacaagcagtcaattgccataaaaaaacaccatcctggcaacaggacggtgttgtttatcatcactcaggctgaaaattaaccaccgcggcgtttgcggccggtagcatggatgtggttaatggtggtttcttcatcgccttccagcaccacttttttctgccgggaaagcttatagttcagaccgagaagatgacgtgcctgatggttcgatttcattctgactcctttatcctgttctggtttcaagggcaaacccggtaatgaccggatgaaatgtaacccaaagtcggccgcgcgttttttgtgcggccacaggtagggtggtccattttctcggtaatagcaaccctggggagccagattaagaacagtcctccttgcgcgccgcaggggtcaccacttcatctcaccggtattaactttggcgcttaactccagcgagctggtctccgccaggcccggccactgtgcctccatcgccttgatcaccccggccgaatccgaatgcgtcttcagcgcctgctcgaactgctggagataagtttttgtaaagcgcactgcgctgtctccctccggcggggtgcctagataatggcccgggatcacccgctgcgggtgcagggcgatcatctggtccagcgtattacgccattgctgacgactggccggcgtctgggtgtcggcggtccagagatgcataccccacgccacgccggtgccgccgaggatcgttttgttcgcccggatccagacgaacgccgcgtagtcatgcggctgcatgatggtcactttctcgccatcgatggtaaagctgttggcctccagcgcctgcgggacatacacctgcgtcggcgcgccgtctttcatttgcgggccccagtacgccagtttggccgctttggtggctgcaatatgtttgacgacctccggcgtggcgaccacctccgcctgcgggaaggcttttaccagcggctcaagaccaaaatagaaatccggatcgccagaggtgatcacaatccgcgatagcggtttgccgtttttcttgatcatctccaccagcttttccccatctttgacgctgaactgcgcgtcgaaaagtaccgcttcatgcggaccggaaacgagggtcgagttgacggcaaaaagtcctttttcctgcgggttgtaagtttgcagcgtcagaggcgccgcgaagaccgcgccgctgaacagggcggtagcaacagcaagggcagataatttcatgatttattctcagtaacaggtgaatgcgttccattgtacggatttcgctatttgatagaattcctgaaacaagagatgctgagtttcataaaacgtgcagatcagggggagtgatggacagggtgattgctgcgcaggtgtatctgcgcatctgcgagctgggaagtcttagcgccgcggcgcgggcgctggggatgtcgcgcccgatggtgagccgctatctggaacaaatggagagctgggccggcgcccggctgatccatcgctcaacccggcggctgacgctgaccccggccggggagaaggtattgctcaagacccgcggtttgacgcggatcgccgatgaaatcgccggcgagcgtcagcgggccgatcccagcggcacactgcgcgtcgcctgcgcgcactttaccgccatgcagctgatctctccgctgctgccggactttctcgcccgctatccactgctgcgcctggagctggatatcaataaccatccggtcagcctgatcggcgagcgtatcgacgtggccattcgcattaccgacaacccggaggcgggggccatcgctcgtcgcctcggagtgtgccgttcgctgctctgcgccgcgccgggctggatgcgccagcatggcccattgacgacgcccgacgatctgcaacgacataactgcctgctatacagccatttcgccagccagcactggcagttcagcgatgcgcaggggcgggaagcgtcggtggcggtgaacggtaatctgagcgcagggatatcttcattgctgctggaggcggcggttgccgggtgcggcattgcgatgcttcccgaactggaggcccggggcgcgattgccagcggcacgctggaggtggtgcttccggagtggacgccgaaggcgttgagcgtttacggcatctatctttcccgcgactaccaacctgacggattaccgctatttcttgatgcgctgcagaggcgtctgggagaggagactggccacggctgagtcttggcgcttcgcgccccgacagcaccggcggaaggcaattccgccggtaggctgacgttgagctttattcgttgccccactgattaaggaaattagcgatatcgtcaatgcggttttcgttaatggccgcctcgcgggccatttctcgctgcgcctcttcgtcaatctcttcgttattagttaaccgcgcaatcagcagttggaaatagcgcgccagcgcatcgcgttcttcatcctttaccggcacagccgcttcggtctcgtattcgtccacgatgtcataaaatttcagggggatgtcattactcatctgtcgtcctcaggggtggcgtcggggccagggttagcgcacagcggcgggcggacatcatagcatgcggccagagtagcggagtggaggaaagaaaaaattgccgcaaccgggaggcgaggggccagtatatagccgcaagggttggccgggaaaataccggcgcgcgctggcgcgcgtcggtatgccgggaggcttagaccacaccatccccgccgtcagaacaccacacctgtccggaggtatatgagcaggcatcggatgccagggtgacatacagcggggcgatctctaccggttgtcccgggcgccccatcggcgtgtctttgccaaactgtttcaccttctcgtccggctggccgccgctggattgcagcaccgtccagtaagggccaggcgctacggcgttcacgcgaatgcctcgtttcgccacctgtttagccagcgatttagtgaagatcgcgagacacgctttggtctgcgcataatcgagcaggatcgggctgggtttatacgcctgcaccgaggtggtattgataatcgcgcttccggcctggaggtgaggcagtgcggcgcgggtgatccagaacggcgcgtagacgttggttttaaaggtagcgtcgaaatcttcggtagtgagttcctcaagggtttcacagtattgctgacgcccggcgttattaaccaggatgctcagacctcccagctgttccaccgcgtcggccaccagcgactggcagaaggattcggagcgaatatcacccgggagggccaccgcggtgcgcccttcggctttgatcagggcgataacttcatccgcatccttttgctcttcgggcagatagtttatcgcgacgtcggcgccttcgcgggcaaaggcgatcgccaccgcacggccaataccggagtcgccgccggtaattaacgctttcttaccggccagtcgcccggagccggtgtagctggtttcaccgtggtccggggatggctccatttccgcatccagacccggcggggtttgttcttgctccgggaactccggacgtggagccgtctcttctggcaacatggaggtgggtaacttcttcattggcggtttttcatcttgcatagtcatctccttcagacagaacgggccagctctaagaataggtcagcttctcctggcgacagaccctggatgactcgcaacatcgcagtcaatggccaatcgtaggcgtaacggtatgccttaaccgactgatccttggcgtatttcgggggatagcgttgcgttattattgctgacgttaaattaggattattccatccttaatcaagggccaagggctattttcgtaacgcgcatgatctttttctcaagttacgatgaaggtgctgcatgaataaacgatgaagatgttcattagcaaaccatggtctataaggtgatacctctttaggggtaatatttctggatattgtgttccgcgagataaagaaatatttattcattaaattgtttgcatttttttacaaacggccgttggacgtttctgttttacccgccggtgaacataacctacgtcaaataaaggagttgtgtgaggtatattttatcttaccgcttcgttagtaaagctttattttgtcagtgcgcagatgggtatctgaaattaatttgactcctgcaggcattcctctagtgttagatatcgagggcgatgatttgtaacagggtcattttccatttaccaaccgatattgatcaaaccaaaggtgaaaattatggcagagcatagaggcggttcaggtaattttgcagaagatcgtgagaaagcatccgaagccgggcgtaaaggcggacagcacagcggcgggaactttaaaaatgatcctgagcgtgcatccgaagccggtaagaagggtggtaagaacagtcatggcggcggccgtaaatccggtgacagctagcgactgatgagctgtgacgccgacaaatcggcgttgagacaaaacctgtgggccagatggtccgcaggtttctgcatattcagggtttatttctctataatgacattcattatccgcgatgcgggggaactaaaaggtgaagaggaaatcgccgcatcactagcaataaaagacggccgcagcggcaataaattagccggacggtaaagacagaaaataacggaacgggacaatacgcaacgctactttcttttttatgcttaggcaaaagaaagacattttcagcgtaaggtttagcgcctgacgctgcggtcagagcgtcgataaaatggtcgctcaatattgttcggtcctaaggtaataaaatgaagttgacgccagtgtttattaagcgctgtcatcttgtcgccgccgttatgtgggtgggtctggcgataccctcgttaatctggtggaaagacagcgtactgtgggtcattctcatcagtatttatgccaatattgttggccatttatccggatatagcgcagcgcgagctgaccaggcggcggaagagagtgaagattccacgtcaaaataaaaggttaatgatcagaggtgtatatgacggatattgaaaattatcacaactggcttcgcgatgcgcatgccatggaaaaacaggctgagtcgctgctggtggccaccatcagacgcctcgataatgaaccgcagttacgcacccgccttgaacaacatctctatgaaacccgacggcaattgtccgccctgcaggatatcatcgcccgcaaccatatttcccgctctgcgctgaaggatgcgatgagccgggtggcggcgttaggacagaccattggcatcatgctgcccggtgatgaggttattaaagtgattatcactgcctacgtttttgcccattttgaggtcgcctgctataccgctttattaacggcggcgaaaagagtaggcgaccacagcgcgatgcatacactggagggtatcctggctgaagagagaggaatggctgattggctgctccattatctgccagcgctgaccgggcaatatcttatggataccgatatgcctggcgttgaggccgggcattaagccgccggagaacgctatggtcaaacggcaaaccatcgcgctcctcgccgccgaggaacaggttccgctggtattaaccgccaggcagcaggcgctggtggacgcggtagcgaacaggatgctaccagcggaacgcaatcccgtatcgcctgtcgacaaaccgcgctcgaaggccagggcggggtccggatcgcgctgaggcggctgacagggacgggcagaacgcgaggtgagagtgatgcaacgggaagagtggtttcacagagcggtcatctatcaggttgacagttcgctcttttatgatgccaatggcgatggttttggcgatctcgcgggcattcgccaaaagctacactacattcgcagcctcggagcgacggtgctctggctgactccgttctatctcactcctctgcaggatgatggctatgatatcagcgatcatctgcagcccgatccgcggttcggcactatcgctgacgtgattgagctgattgcccgcgcccgcgagctgggactgcgggtgatcgttgagctggtgatccagcacacctccgcgcagcacccgtggttccaggcggcgcgacgcgatccccggtcgccgtggcggccgtattatctgtgggccgatcggccgccggaaaacgacgatcctcccatgtttcccggcgttgaggagagcgtctggcgctgggacgaacaggctgggcaatattatcgccacatgttttatcaccacgagcccgacctgaatctcgcccatccgccggtgatcgctgaaatcgaaaacattatcaccttctggctgcaggctggggtgtcgggctttcgtctcgatgccgcgtcacatctggtcaagcaggccggaaagggcgacgagacgcgcggctacccgttgctgacccatttccggcaggttgtacagcgcctcaatcccgatgcgatactcctgggggaagtggacgtcgcggtagaagattaccgtcattatttcggccagggcgatcggctgcagatggtgcttaatttctggcttaacaaatacctctacctcagcctggcgcagcagcgcgccgcgccggtggtgaaggccctgcaggcgatggtgaccccgccggacgggtgctgcttcgtcaactggctgcgcaaccatgatgaactggatcttgaggggattggcgagcgcaacaagcgccaggttatccgcacctttgcccctgataaatcaatgtccgtttaccagcgcggcgtacgccgaagactggcgccgatgctggacggcgatacccgacgcatagcgttagcccatgctatcctgctggcgctgcccggcgtgccggtgatgcgctatggcgacgagattggcatgggtgacgatctctccttaccggagcgctacgcggtcagaacgccgatgcagtggtcagccgcggccaacgccggcttttcccgggcggcgcgggatgatttgccggtaaaaccggtggccagcgggcggttccgctatcaacggatcaatgtcgaaacggcgctgcgccatcccaggtcgctgctgcatcgggtacgcaatatggtattggcgcgcacggaatatactgaaccgggatccctcccttttactctccttactctaaagcccgacgcggtgctgggcttgctctatcgcagcgaatcgcgggaggtactgatgctggccaactgcagccagcaggcggtagaggtcctgctcccgccgctggccgagggctactggagcccaattctggaagataagctctatcaggatgggctgcacggcgggaaagatgcgcggctggcactctccgggtatggttaccgttggttcagccgcagcctgagttagcgccgttttccggaacgacggaacaacgcccgcagcgccatcgtcgccaccgctaccccgacgccggcggcgactttacccgggagatcggcgctgatggtgactgctttacgccgtgcgccatcgttaaaggggccgtggcccggatgattgccgcgcaccggcgtgaacaggtcgtcctgttggtctgacgactttggctgaccggtaaactgtccctcccacgcttttttcaccatcagccgatcgagcaggcgagggaagaagacctggccgaggatcgactggatggtgctttttccgacccacagctcgttgaccgggcgctggatgacgctgtaaatagcctcggcggcgacttccggctgatagaccgggggcaccggctgcatggcctgatccattttgtttcgcgcccagccaaactgggcggtgttcatccccggcagttgcaccatggtcaactggatgtggcttttctcatgcatcagttcggttcgcacggcatcggtaaagccgcggatcgccgctttcgctccgcagtaagccgactgcagtgggattgaacgccaggccagcgccgagccggcctgaataatcaccccccgatcccgggggatcatgacctccagcgctgcgcgggtgccgttcacgtacccgagataggtcacctccgtcacccggcgaaactcctcctcgctcatctgacgaaagggcgccagcacggtggtcatggcgttgttgatccagacgtcgattgccccgagggtggtttccacctcggcggcggcgcgctgcagcgccccggcatcgacgacatcggcgctaatagccagcgttttaatgccaaaccgttcacaggcctgtcgcgtctcctgcaaacccgtttcgtctcgggcgatcagcgccacgtgatatccagcgcgggcgaaacgcagcgcggtagctttgcccgctcccgcggttccaccggtaataaccatcacagacatagtgacctcattatgttttggctttcacaatattgactgtacggatcggttaattatttctcaccaatggcaatgacgaggtgggaaatatcctggaataagcgcaatgtgaatcaggcggcatctcctggttagtttcggcagatcctacatacttcggcgaaggcgttctataatttgtaggatccctgacaaccagcgaggaggaaaaatgttaatgttgaacgttgttaacggtgaaaaagaagaggatgacgctactcgcgctccggaatcaggtgataaacaaccggagcgtgataaatagcgaagccgatactattcctgctcaggaataatggatatctggccgttacgctcgagaatagcgaatttgatcgctttcaattcataaatgccatggtgctgcctggccgccagcaggatatcatcgacagagatattgacgagcttaatcttctcgtcgatgacagcaccattttccaccacgataaccggcgtaccatcgagaaaattttctgcctgagcaaattttttcttaatatagccgaacaaaatatcaatactaaccagggtgacgatagtcagcatcgacccggtaaccgaatagtctgtgctgagcatcgcctgctgggtggcttcgctgataatcagcaacagtatcaggtcaaagttggttaattgcatcagggttcttctgccggcaatcttaaaaataatcaacaggatcagatagattgctgcggctctaaggaccatttccatagcgactcctacggatagacaaactgctgccaggttacagaatagcgatcgttaactaccgcctgcagggagatattaccggccgtttttggggtaacggctaaccacacagatatcggtgaaggcggggtcgaccgctgatagacgagatgtaatttcccgtcggcgctatacattttatccggctgcggacggatatcaccgatctggtagcgggttaataacggggcggcgaagctgataatggtgtcgctggccgtatccggtttaatctgaatattaaactcggtttcactcatcagcctggcatagcgctgataatcgacgcttaattcgcctccactggtttccctgtgtgcttcactgaaataaccggaggaccacaggccgcttaacgcggtaagaatgatgagactcaaaacaattatcccatagcggcggaaacgatattcaaagcgtaaggagcgttcattctcatcgacgataggacaaggctgttgattcttaatcattaatattttccccgcgtttcgtttcgccaggagcgtaacgataaggacattcttatattagacgatatcagaacaattgactttgtaaaaatggccagcatcagccaggctttattctcatcgtcagcaaaaaacggaggcatgatgaaaaaactagcattggccatggcatgtctgtttgccgtaggtgtcgcgcaggcggacgataagggagggtttagccaggatgccgcgccgccgccgccgcacaaactcgatgacggctatcgcggcgtcgaggatggccggatcatgaccgttgagcaggcgaaaaccatgcacgatggcgcgaccgtttcgctgcgcggcaatctgctcaagcggcagggagatgaccgttatcagtttcgtgataaaagcggcaccatcaccgttattatcccggtcgccgcgtttaacgaacaacacgtagagccagacgatctggtcaatatcaacggcagtctggatcgcaaaatgacgccgccggtcgtgcgaatcgatcgtctgctcaagcagtcgcctaagtaagcggagcacgtcgatatgagcaccttttctcactcgcaagacgaagagcgcggtaagcaacctgcccgtgaggcgcccggagagcagggcgaagttccgcgtaaacgggacgacagcaaggatgacaaatccgatccctggcatccgcaggatggccgatagcgtcgccctgcgtcaccaacgacacgaaaaccaggggaaagtgggggccagaggctgcaaaaagacgcagcttcggcatcacgcactatactttttgttcgacatcactacaggaggaatcaaatggcgattcataagaaagggctagcgcactgggaaggcgacctgaagcatggcaaaggcaccgtgtcgacagaaagcggggcgctgagccagcagccctacggatttaacacccgttttgagggggtgaagggcaccaaccctgaggagctgatcggcgctgcacatgccgcctgcttttcgatggccctgtcgctgatgctcagcgaagagggatataccgcaacgtccattgacactaccgcagtggtcaccctcaataaaaccgacggcggctttgcgattaccgatatcgcgctgcaaagccagatcgtcctgccggacgtgtctccggcggcgttcgatgagatcatccagaaagcgaaagcaggctgcccggtatcgcaggtgctgaaggccaacattaccctcgattaccagctgaatccgtaagccgtcgtgcccgcgtgctgcgggcactctttccgcaatatctctcccaatgctgtccaacagtggtatcttttgtcctttagttgcacgtaagggataccatcatgatcggcattcgccggatgatcgaggcgcaggtgctcggcctgaccggcatggcgctaaaagagatcgactttgaacgacccaaaggagagccggggctgtttggtccccagtcggccatctggcaggtgcacggcgattttacctcgatgctctgcggcggcattagcgcgctgttgctgcagatgctgcatcctctggcgctggccggcgtctgggatcactctcgttttcgcgaggatattttgggtcgcctgcgccgcaccagccagtttatttctgccaccacttttgccactacccccgacgccgaacggctaatcgccaaagtacaggggatccatcagcggatcgccggggtggataaggacggaaccccgtatcaggcgagcgacccggcgctgttaacctgggtgcacgtcgccgagtgcagttgctttatggcctcccacctgcgctacaagcggacggtggtcagtcccgagcgccaggaggactattttcgtgagtcggcggaaatcgcccggcggctgggggctcgggatatccctcagacaccgcaggaggtggcggactatctcgaggcgatgcgcccgcgactgcgctgcgacgaacgtacccgggaggtagctcaggtgctgctctccacccgtctgccggggcggatgagccagccggtcggccgggtgatgatgaacgcaggaattgacctcctgccggaatgggcgcaggagatgctgggattgtcgctcacgccgctgcagcggcgcacgacgcgcctgatggtgcatggcgtggcccgcgtactgcgcgcctcggtacgcaacggcgcctggcattgcgccatgcgccggatgacggaggcgtgattcagttcgcttggcccaggtgaccggcaatcagcgcctgcagactgccatccgcccgccactcgctaagcgcgtcgtttaccgcgtgaaaacggtccacgtccgcccgggcgacgcagatggcctgctggatctcggtaaaattatccgccagtacccgcaccccggcgtgctgacaggctgtcgcctccagcggctggcggatgccggcgaccatatccccttcaccggcgaggaaggcgtcgattgcctcctgcgaagagggaaggcgatgcaggctggcgtgctgcagatggcgggttagccatagatcgtatgcggcgttttgtccgacgttaatggtggttgccgggcgatccatgtcggccacgctctggcagggcgaatcaacgctgaccagcgcggtaccctggatggtgatatagggcgaggtaaagcgcagggtggcttcccgcgccggatcgatggccagaaaggcaatatcccagtgctcgccaccggcgtcagccaccactttacccgcggcaggatagggaacgaattcggcgctgacgccccagcgcgtcgccagccgatggctgagctcgacggtgatgcccgcgggctttcctgtctccccgagatgggccaggaccgcattgcccagattaatggcgaaacgcagccgggatggtttgttatgtgacatcgctgactcctgtggtggctaagctaaagtggcccgacctgtggccacccttcaaaagatagttcataggcgcaaggttgcagcgttccaacggcacatacagtaaatagtcattacgaccgccgcgatatcgttaaacggcaaggcaatggcttttatattgttaagcataaactcagtttgtcagtttattcttcccgctcacaaagggagagaaataatgacacaacataattttgaaaatgataataaatatcatgagcgttcggtgcaggcgcgaaagagtacccttgttagcgtggtggttaatattttcctttctgccttacaggtagtcgtgggaatattttccggctctcagggattaattgccgacggaatgcactctttttccgatctggtcgccgatggcgtggtattgatggcgaataaaaagagccgtcgaccgtctgaccacgatcaccactatggccactggcgctatgagaacggcgcctccctaatcatcggcgcgatgctgctgctcgtcgggggtggcatgctatggtccgcggcgggccatctcgcgcaaccgcaaactattccgccggtgcacagcgcggcgctgtggatggcgctggtggcgctggccgtcaaggaggggctgtttcgctatatgctggcggccgccaggcgcctgaattcgtcgctgcttatcgccaatgcctggcatgcccgctctgacgccgcatcctccctggtggtggccctggggattatcggtaatctggccgggttcgcctggttcgacccgctcgccgcgctggcggtggggctgctgattgcgcgcatgggctatcgtttcgccgtcagcgcgctgcatgatttaatggaccgtgcggttgatgaagagatgcagcaggcgatcgccgatacgctgcgaaccacgccgggcgtggcgggcctccacgatctgaaaacccgtaaggcgggggatctggtgctggtggatgtccatctcgaggtggctggcgagatgtcggtagccgaagggcatcagattgcccgtcacgcgcgggagcgagtgctggcgcagcatccggtgcttaatgtgatggtgcatctcgatccctgcgaagcgcaggggttgaagaaagcggtctgatacacccggtagcctaagcggaaaaatgaattggctcagcggttattttttcttctgagccattattgctggcgcattgattgcctgaaatataaaaaaggcccatactaaaaacgccattaccatcgctaaataatggcgcagatctgcccatcgcagttaacgataaaataaaccaatcggctcatagataatctctattctgtattcagagataatgaccagagcggtaattcaggaagtcagacaatgatcattcggccagaacaacactggtttcttcgcctatttgactggcacggctccgtgctgtcgaaaatcatctttcgcctgctgctaaatgtgctgatgtcgatcatcgccattatcagctatcaatggtacgaacagttggggatccacttaaccgtggcgccgttcagcctgctggggattgcgattgcgattttcctcggctttcgcaacagcgccagctacagccgcttcgtcgaggcgcgcaatctgtgggggacggtgcttatcgccgaacgcacgctggtgcgtcagctgcgtaatatcctgccggcggaacacgatgcccatcgccgcatcgtcagctatctggtggcctttagctggagcctgaagcaccagctgcgcaaaaccgatccgacggctgacctgcggcggttgctgctggaggagagggtgacggagatcctcgccagctcaatgcccaccaaccggatcctgctgctggccggcaacgaaattggccagctgcgggaggcgggcaagctcagcgacatcacttacgggctgatggacaacaaactcgacgagctggcgcacgtgctgggcggttgtgaaaggctggccaccaccccggtgcctttcgcctataccctgatcctgcagcgtaccgtctacctgttctgtacgctgctgccgttcgccctggtcggcgatctgcactacatgacgccgtttgtctcggtctttatctcttacacctttttatcgtgggattcgctggcggaagagctggaagatccgttcggcaccgcagccaatgacctgccgctgaacgcgatgtgcaataccatcgagcgcaatctgctcgacatgaccggtcagcatccgctgccggagacgctgcgtccggaccgttacttcaatctgacctgagcctggcccaccgggcggtttcgctgcccggtcatcactttccgtagcaatttatccgtcacagcaccgcggtgaaaaccgcaaaatttgcaaataagttaaatttaacacctgatagataacatcaattatacagaattgtggtgtatgttattattcagttaacaaacgcagtacctacgctttcccatcgtactatccttgagaaacagcattcttttcaggtgacgccatgcgattcacgcttcgtcgccggggttgtcgtacgcctttttcggctagcgacagccagaacagagcagcaggagtaaagagatgaccaataaaagacgcgcggttcccggtgttcacccctatgacggtccggcaggcgggtggggcgcgttgaaggccacggccatcgccgtgcgcacccagatggatgcctttgaggcgcccgccacgctgctgcgtaccaaccagccggacggttttgactgcccgggctgcgcctggccggataaagaacataaatcgaccttccagttttgcgaaaacggcgccaaagccgtgacctgggaggcgaccaccaaacgggtgacgcccgcattcctcgcggcaaataccgtatcttccctgctggcaaaaagcgattttgaactggagggctacggccgcttaacccatcctttggtttacgaccgggacagcgataccctgcgtccggtggcgtgggagcaagccttcgcccgtatcggcgagatcctccgcggcctgcagccggatgaggttgaattctacacctctggccgagcctccaacgaagcggcgtggctgttccagctgtttgcccgcgagtatggcactaacaacttccccgattgctccaacatgtgtcatgaatccaccagcgtgggcctgccacagtcgatcggcattggtaaaggcaccgtctccctcgacgattttgaccagaccgagctggtgatctccatcggccataatccgggcaccaaccacccgcggatgatgggcaccctgcatgagctatcccgccgcggcgtgccgattatcgttttcaatccgctgcgtgaacgggcgctggagcgttttgccgatccgcagaacgtgatggagatggcgacccggcgctcgacgccgatcgcctcgacctactaccaggtacgggccgggggcgacgcggcggcgctgaaagggatcgccaaagcgctgctgcagctggaggaggaacagggcaatgtgctcgaccacgcgtttatcgcccaacatacccagggattcaccgccttcgccgatgacctccacgccacccgctggcaggatatcgagcaggagtctggcctgacgcgcgaatccctgacccaggttgcggcggcttacgccaaatccagggccaccatcgtcacctacggtatgggcatcacccagcataacaaaggcacctccaacgtgcgtctgattgccgacctgctgctgatgcgcggcaatatcggcaagccgggggccgggatctgtcctttgcgcggtcactcgaacgtccagggtaaccgcactgtcgggatcagcgaaaaaccctccgcggctttcctcgacagcctgcagcgggtgatggggattacgccgccgcggcatcatggccacgatgcggtaaaagccctggaggccatgatcgccggcgaagccaaagcgctgatctgccttgggggcaacttcgccgtagcgatgccggaccacgaacgcgccttcccggcgatgcgcggccttgagctcagcgttcacgtcggcaccaagctcaaccgctcacatctcctgacggcgaaagagacctttattctgccgtgtctgggccgcaccgagcttgacctgcaggccagcggccggcagtcgatcaccgtcgaggattcgatgtcgatggtgcatgcttcgtcgggcaagcttaagcccgcctcgccgatgctgcgctcggagccggcgattgtcgccggtctggcgaaggccaccttgccggccagcaaagtggactggcagtacctcgtggaagactacgatcgcattcgcgatctgatcgaacagaccattcctgggttcgaggattataaccagcgcattcgccatcctggaggcttccgcatgccgctgccgccgaccgagcgcatctggcctaccgccaccggtaaagccatgttctcggtatttaaaggggtgcatgagaacgtggtggtggagggtgaggacgtgatgcgcctggtgacgctgcgcagtcatgaccagtacaacaccaccatctacgcgatggatgaccgctaccgtggcgtctttggccgccgcgacgtgctgtttatgaacgagcaggatatggccgcccagggtctggagcatggcgatcgggtggatatccataccgcgctgccgggaagcgcgctgacgctggaagatatcacggtggtggcctacggcattgcgccgggcaccgtcggcgcctattatccggaagccaacgtgctggtgccgctgaactatctcgatgaagagagcggcaccccttcgtataagtcggttcccgttcgcctgacgctgcgctcgaaagagatccgtccgctggccggcgggcgctaaaaaggtatagcgcagagcggcgttgcgccgtcctgcgccccgcagcacctcgtggtgtcctcgcttgaatttatcgctagcgaaactaacattctggtaacctgtgcgcggccccgggggtgaacggcggggttcaaacgggaaagagaatggatattaagcaactcaagtatttgatcgcgctcgatcagacgcgccattttggccaggcggcggcggcctgtcatattacccagccgacgctctccatgcgcattcgtaacctggaagaggagctgaacctgacgctgatccagcgcggccaacgctttgaaggttttaccccagagggagagcggatcctggcctgggcgcgggcggtgctggccgctcatgacggcctggcggcagaggcggccatctgtcgcgggcagatggtcggccagctgcgggtcggtatggtgccgctggcgagcctcaatccgatgcagttgattagacccctggcggagaaatatccggcgctgcagttcagcctgttgtcgatgacctcggagcagattatcgatggcgtcagccgtaatcagctggatctggggatctgttatctgcagcatctggatgaaggtcagttcaagattgctcgcttgccgcaaacccggatgggactgctgcacgataaacgccatttcgacttcagcgccgggacgccgggatgggagacgctggcgacgctgcccctcggctttctgaccaaggggatgtattaccgggaatcgattgaaatcagctttaaggccaaagggctaacgccggggtatgtctttgaaagtgattcgacgtttcagattatccaggcggtgcaggcggggatctgctgcgccattatgccgcttaacaacggcctcgaagcgctaagcgataatcttgaaattctgccgatcgccgaaacccatgttgattcacagctggcgctgattatgcgccagcaggaaccagtctcgaccctggcggaaaaatgcttcgccgaggcgcaggggatatttggctgaggccgggccgccgacctggcggcttgtcactaaaatgcctaaacgcccctctgatgggagagtgtcaatatagccccggtgatgctggaccgttggtaaaagtggtattgcggcgccgcttaatgctgtccagaagttacaagccttaatgacaattttttatccctcctgcagtacacatcacaaatattaactatggcaacagccgtcattcactcaacaagtagggaaaccgtatggatatggaagcaaccgtcatggaactcatcattaacgccggtgagtcccgcagtctggcgatgcaggcgctgcaagccgccagaaaaggagtgtggcaggacgttgataggctgatgcaggacgccgcagatgccgcaaaacgcgcgcatgatgtacaaaccatgcttatcggtatggatgagggctgtggcaaagtaccggttaatcttattctggtacatgcccaggatcatataatgacctctatgcttgcgcgggagttgatcgcggagcttattgaggttcagcgccagctgcaacatcgcaactgataaaatatgtcgccgccggcaccctcggcggcgaccgccatcagatattctccagacgaatgccgcgcgttctcgggccgaagatccccactgacagcatcaccatcagcatactgacgacgataaagctaatcacccccggcgtgccggcgtattgcagaataatgccgatcagaatgctggtcaccgcggtcgagagccggctgaacgagtagcagaagccgacggcgcgggcgcgaatatgggtcgggaagacctcggcctggtaggcgtggtagctgatggtcagccaggcgttggaccaggtgatcataaacccgcagatcaccaacaggatcggactgttttgcagagcgaacagggtgccgaagataacggtcatcagcgcggagaggacaatctgccacttgttttcaaagcgatgcacgaagcgggtgcagaacaggcagcccagcggataggcgagggtgataaagaaggcgtacagcaggctatgggtgatgctggcgccctgaccggagagcagcgccggcagccagttgccaaagccgaagaaaccgatcgcctggaagaagttcatcaccattagcatcagggtgcgctgccgatactgcggcgcccagatttcgcggaaggtgccgcgtttgacgacgctctgtgccgcatgcgcatgcttcggcgacggcgtcaggccgcagcgggcttccatctcacacatcaccgtatgcgcgtcatcatgccgccctttgctttccagccagcgggctgactccggtagctttttacggataaaccagatcgccagcgagaacagtgcgccaaagatgatcacccagcgccagccgctgaggccgaacagggtggtcggcaccagcatccaggacatcagcgccaccgccggaaccgagaggaactggatgaagaaggcaaaggcaaaggctttattgcgcagatgggttggcacccattcgctgaggtaagtatcaatggtcaccagctcaatgccgaggccgatccccaccagaaagcggaagaagatcaccccttccgcgctactctgcgtcgccatcagcagcgaaaaaagaccgtaccaggcgagcgccaccataaaggtcaggcggcggcccagtttgtccgccagcggcgccagcagactggcgccgataaacagccccataaaggtggcggaggcgaaggccgcctggtcggcgatgccgaagatgcccgcctgtccggtgtggaaaatgccctccgccagcaggcccgcgctgatatacccggtctggaagagatcgtagagctcaaagaagccgccaagtgagagcagggtaataaacgaccataacccaaatgaggcgggcagcgcatcaatgcgtccggttaagctggcgtgcggttgtcctggcgaagcatagggcgtttcgccgagaacctgggtggtagacatggtgttgtgttcctcaggaagaatggtttgcctgctaatgttaattgattgttaatagttttaaatttttaatccttagccttagcgacattctttagcgtaagatcgcgctggggagacataaagttgatattcatgctggttttcgccgcatcccagcgacagaattgaagtaattcaccgctgacggcattttagtcgcctggcgatgtcacgctacgcaggacccgcgaaagacaaactaaacgaatcgtcaccggcggcgttttcgtgctttacccatcattaccccgggctataatgtgcccacttttattcaggagtcatacgttggacagtcacccttattgcgattttccggcaagctaacgcgatcatttcgctgcttgccgtcccggcgggcagcaatctctcagttccggattgcctccctcaataatttatgcgccattgagcgcgagaggcagcgttatgtttatgttttccagacccttatttcctccaccatcatccaccggctaatcgcccggcgcggctgagcgctagatctgtaatttttggctttctgttttctggaggaaggcgcgatggtatttccttatatgacacatttactcgcggcaatgttgttgggggcgctgatcggcgcggaacgacagtggcggcaacgtatggccggtttacgcaccaatgccctggtggccaccggcgcggcggtgtttattctcagcgcgatgtcggcctcgccggacagcccggggcgtattgcggcgcagatcgtctccggtatcggcttccttggggcaggggtgattatgcgcgatggcatgaacgtccgcggcctcaataccgccgccacgctgtggtgttcggccgggatcggcgtactctgcggcctgggacagttctggaacgcgacggcggctacgctgattattctgtgcgccaatatcctgctgcgcgaggcggcgcagcgcattcatgccttgccgggggccggtgacgaagagaaacgctatgtcttacgcgtcacctgtctgcgcgaacatgaaaatgccgtgcgtcagctgttgctgaatattgcgcagcagcagcggtttaccctgcagggattgcagtcggcggcggcggacacagcggaccatctggagatttgcgcacagctgattagccataagcagcaccaaaaaacgctggcgcaaattatggcgcaaatgggcgttcagcagaacgtcacatcggtgcactggcgtgtcggagaggcgtaggggctggcggcggagcagcggaaatggccgctcgtcgcgcgattcgccatcccgcgggaaagcggctagaatggcctcctcgcaggaggttataagaatgttaaataatggatgtgtaccctcggaatctggtcccacagaggtgacggctgattttcgttttacccgcgtgatggccgagcaggcggcgcgggcgcgtctgacgctggacgacgatcagctgtcactcatcgcccgccttgacgccctcggtcagcagttggtgtccacgacaggcaggccgcagggggtatacgtctggggacgtaccgggcgagggaaaagctttatcctcgaccactttttcgccagcctgccgctcgccgccaggcggcgggtccattttcatcacttcttccgcgaactgcaccagcggctgaatgcccccggagcgcccgacctgcagacggtgatgaggcagatgacatccggttgccgcctgctatgcttcgacgaatttcatctgcacgaccccggcgacgccatgctgattaaagccttgctggaacacctctttcaacacggtatcgtgctgctggccacctcaaactacccgccggagatgctgctgcccaatccgctgtatcacgatcgctttttaccgtcgatcgcgctgatccgcgcccatctaacggtggtggcgctgaacggcgaggaagattatcgcgaacggcatctgagccaggataacgccttctgcagcgggcggatgtgggttaatccgaatgcacaacagcgtcagctgtatgacctgccgtcgctgcctggcgaaccggtttcgctgacggtaggctatcgcacgctgctggcggccgcggcgtcgcccgcgttgctgcacttcacctttacccagctttgtcaggccgccacggcggtgatggactatctgacgctctgcgaaagctatgccgtctggctactggacgaggtgccgccattggctacggtggggccggcggcccagcagcgctttatcaatgtgattgatgtgctgtatgaaaagcagatccgcctgctgctggtgacccgctgcgacctggagacgctggtggcaggggtggaactggaggatattcaacgaacgcggagtcgcctgcaacagctgccgcgggcggtataagaaaaacgccccggcgggagccggggcgagaggattacagatcgaagcggtcgaggttcatcaccttggtccaggcggcaacgaagtcatgcaccagcttctgctgcccgtcggcgcaggcgtacacttccgccagggcgcgcagtaccgagttggagccaaacaccagatccacgcgggtggcgctgtacttcgcttcgccggttttacggtcgctgccggtaaacagctccgcgttatcatcggccgctttccagacggtagccatatcaagcagattgacgaagaagtcattgctgagcacgccgacgcggtcggtaaacaccccgtgtttgctgccgtcgtagttcgcgcccagtacgcgcaagccaccgaccagcacggtcatttccggggcggttagcgtcagctgctgcgctttatcgatcagcagggtttccgtcgagacaccgccttcgatacggcgatagttgcggaagccatccgccagcggctgcagcagatcaaacgactcgacgtcggtctgctcaggcagagcgtcgacgcggcctggggtaaacggcacattgacgctgacgccggcggcagcggccgcctgctcaacgccgaccacgccggccagcacgataatatcggccagcgacgctttgccggaggcgcgctggatcgcctgcagggtcggcagcacccggctggcgatggcgttaaccggccagtctttctgcggggccagcgccagacgcgcgccgttagcgccgccgcgtttatcgccgccgcggaaggtggaggcggacgcccaggcaaccgagaccagctcactgaccgacaggccggcgccggcgatggcgcttttcaggctggcgatatcttccgcgctcggctgatgggtcgctgccggcagcggatcctgccaaatcagatcttctttcggcacttccggcccgaggtaacgggattttggccccatatcacggtgggtcagcttgaaccacgcccgggcgaacgcctcgttaaaggcctgcggatcgttgaggaagcggcgggagattttttcaaactccgggtcgaagcgcagggtcaggtcggtgaccagcatggtcggtttgcgctttttctccgggttaaacggatccgggataatctccggcgcgtctttggcttcgaactggatcgcgccagccgggctgcgggtctgcacccattcgtatttgaacaggttttcgaaaaagtagttgctccactgggtgggcgtctgcgtccagaccacttccagaccggaggtgatggcgtccgcgcctgcgccgctgccgtagctggagtgccagcccagaccctgcgcttccagcggcgcggcttccggctcggcgccgacgtggctggtttctgcggcgccgtgggttttgcccagcgtatggccgccggcgatcagcgcgacgatctcttcatcgtccatcgccatattgccgaaggtggcgcgaatggccgccgcggcggacagcggctcgccgctggcgttcggaccttccgggttgacataaatcagacccatttcggtggcgccgatggcctgtttcgccaggctttccggatgacggtgggccagccactctttctcatcgccccagtcgacgtcgagatccggttcccagacgtcttcgcgaccggcgccaaagccaaaggtgcggaagccggcgttttccagagcgacgttacccgccagcatgtaaaggtcggcccaggagattttctggccatatttctgtttcaccggccacagcagacggcgggccttatcgaggctgacgttgtcaggccaggagttcagtggggcaaagcgctgctgtccacgacctgcgccgccgcgaccgtcaacggtgcggtaggtgccggcgccgtgccaggccatacgaataaacaagccaatatagctaccccagtctgccggccaccactcttgcgaatcggtcagcagcgctctgagatcagccttcagcgcggagtaatcgagctttttaaactcttccctgtagttaaaattctcacccaacgggttggagcgattggagtgctggtttaacagatcgacacgcagctggttcggccaccagtcgcggttggcggtgccgctgccggcgctctgttttggcgtctcggcgtggaaagggcacttcccggcggatgcattgttggatgggtcgttagacgtgctcatatcaggctccgtttgcttttgtgaatgccgttacgatatacactgctaccaataagcgatatttgaatgaatctacggatttaatagctatttccgttcaatgaagggttaggcaacctcctggtgggaccgtgtcggcctggagattgagattaacctcattagtaaccatagccgtaacgaggcggcaaaggaaacgatccgcgtcaagctgggcgaaggaatgctaattgtttgagatatgacaagttttactacgaaactcgcattagcgctgccagtagggcggcgatccaaacacgtcggcaaaatagtcaatcactgtccgcacgttgagagagggatggcgggtataaggataaatcgccgcgatatacgatggcgtgtggctgatggccgccgaatagcgatccatcagcgtgactaatgtcccgttgtgcagcgcttcgctgaccatccagtcgggaaataacacgatccccatcccgccgatggctgaagtgagcagggcatcggcattgttcgaggtcatgagcggggtcaacggatagtgcacccatgcctcttcgcgctggcgaaacagccagcggttggctccctgcgaaccgccatacaccagcgtgcgatgttgatgcaatgcctccggcgaagtcgggctgccgtaccgtgaaacatactccggggaggcggtcaggtaatagcgctggctgccaaacactctggcgtgatagcccgcgtccggcaggctgctgatgcgaaaaaggatatccgtcgcatcgcgatggggatcgataaaatcgtcggtcagcgtcaggtcaaactgcagtttgggatgccgggccgccagttccggaagccagggggcgatatgacgctgaccaaaatagaccggcgcattgatccgcaccagtccgccggggacctgtgcccgatcctgtaacgcccgttgtgcgtcggcgtactgtcccagcagttcccgggcggacgctgcgaaaaggcgtcctgcttcggtcggtaccacggcacgggtgttgcggtagaacagctgctgcccgagggcatcttccagctgctggatggttcgcgagatcagcgagggagagaccccttcgcggcgggccactacggaaaaactctggttatcgtaaaccgcgatgaaaagctgaagggcgcgaaaatcgacgctgctggcatcggccatctgtgcaattcctgcaatagtgttttctgcattataccgtttatcgcatcagcacgctgttttatcctcagccgcctgttgtacagaggaggcgcagtaatggcgttattattcattttattagtgattgccggcggcatgggattatcggtcgaggccggcctgctggggccgctggcgagccaggtgggggatctgtgggcaaccatgagcatctttgggattggcgcagtgttaaccttttttctgatgctctttttcagcccgcgtagcagcccgtcgttcttttctctgcccggctggcaactcaccggcggtctgttgggggcggggtacgtggtgatcttgactgtggcgacgccggtgattggtattgccatgaccatgatcggcatcctggcgggtcaggtggcgaaaagcctggcgatcgaccattacgggttattcggcagcccacggcgcaaaatcgatccgcggcgcgccatggcgctgatgttgattatggcggcgttactgctggtggctctgggttaaggaggggaaatggatacgatagtgatcattctggcgctgtgcggcggcgcattgcttagcgtccaggcggcgattaatggccgtcttggcagccaggtgggggtgctgcgcagcgcctttttaaccttcgccaccggcgcgctggtgacgggattgctgatcctgttttttgctccagcgacgtcggtaaacctgctacaggtgcctaagtggcagctgctgggcgctttttgcggcgtgccctacatcgtcattatggtgctggcggtgcagcggataggcaccgctacggctaccgtggcggtgatctttggccagctgacgatgagcctgctgatcgacaactttggctggctgggcaacagcacgatggcgttctcgccggcgcgactggcggcggtgatatgtctggccctcgcgctgtacttaatctacacctcagggaagtcggctacctcccacgaggcggcccgcgcagaacagtgagctgcgccgacgcgtcgggcatcgtgaatatagcctgacgcgtcacgggcaaggttaagaataacgatccctctaacatgctgaaacatttctgccagatcattagcaacctttcagtagggctgacgctgcgataaggctatgcttcccggccgttacgccgttggcttttccagtgattcaggtgatgtaccgctaatgccccttttgagagacgaaattcgcgaccactccgcggaagagatgctgtttatccgccgggccgcaattgcttttctgctggtggtggtctgctttggcgtgctgatcgttaacctctaccatctgcaggtggagcagcacgatttttaccagacccggtcaaaccagaacgacatcaaaatgctgcccatcgcccccagccgcgggctgatattcgatcgcaacggcattccgctggtgcagaatatcaccctgtatcgcctgcaggtgatcccgagcaaaattcccgatatggccgcgctgttgcagcagctgacgcctatcgtcgacctgacgccggacgacatcgccagctttcgcgacgatatgcaccacaccagccgctacaaagcggtcaccctcaagtcagacctcagcgatgtggaggtggcccgcttcgcggtcaacgaattccgtttccccggcgtgacggtggagagctaccaacaacgggaatacccctacggcgcagagctggcgcacgtggtgggctatgtgtcgaaaatcaacgacagcgatctgcagcggctggcgaaaaacggcgaagaggagaactacgccgccgaccgcaatatcggtaagcagggcatcgagggctattatgaaaaagcgctccacggcaccaccggctatcaggaagtggaggtggataaccacggccgggtggtgcgtctactgaaagaggtgccgccggtggccggaaaaaacctctatctgactctcgaccttcatctccagcagtatattgagtcggtgctgaagggacagcgggcggcggtggtggtggtcgacccgcgggatggcggcgtgctggcgatggtctccagtcccagctacgatcctaatccgttcgtcaaaggtatcggctatcaggcctataaatcgctgctggagaatccggaccggccgctgatcaaccgcgtcacccaggggctatatcctccggcttcgacggtcaaaccctatatggcgctgtcggcgctctccgctggggtcatcaccccgaacaccaccttcttcggggcgccgacgtggacgctgccgggcacgcaacgccgctaccgcgactggctgaaaaccggccacggcatgctcaacgtgactaaagccatcgaagagtcagcggacacctttttctatcaggtcgccttcgagatgggcattgaccggatccatgaatggctgagcaagttcggctacggccagtccaccggcatcgaccttaatgaggagtacgccggggtgctgcccagccgggagtggaaacagcgggtgcataaaaagccctggtatcagggggacaccatctcggtcggcatcggccaggggtactggatcgccaccccgatccagatggtgaaggcgcttaccactctgctgaacaatggtaaagtacaggatccgcatctgctctattcgatgaagcagggcaaccatgtggaacgttatcagcagccggcgaacctgccgcaggtgggtgacccgaaatccccgtactggggcattgtgcgcaacggcatgtatgggatggcgaatcagcccaacggcaccggctataagctgtttcatactgcgccgtatcagatcgcggcgaagtccgggacctcgcaggtctttagcctgaagcaaaaccagacctataacgccaaaatgatcccggtgcgtctgcgcgaccatatcttctacaccctgtttgccccttatcagcatccgaaggtggcgatggcgctgattctggagaacggtggcggggatggggtggtagccggaccgacggcgcgcgccatcctggaccatatttttgtcccgcagcaggcatcttcggcggcagccgatgtgccgcagcgtgatagcgccgatgcccagtaagcgacaggacttattccgcaggcgcatcgtccatagtaattggttatttgtcccatcgtcttcccagcggcatagtgttttacggaaacatgacccggagcgaggaggaaaggtgacacgtaaccgattactgctggtccagaccggcacgccgccgacggccattcgccaggcgcatggcgatctgccgcgctggtttcgcacgctgctggcgccgtggcagacgcagctcaccacggtgcgggtgtttgaagatgaaccgctgccgacgccggataaccaaaccttagcggtgctaaccggctcgtgggcgatggtaaccgatcgtctggcgtggagcgaacggaccgccgactggatccggcaggcggtggctatcgacatgccgctgttcggcgtttgttatggtcatcagctgatggcccatgccctggggggcgaggtggcgtatcatcctggcgggcgggaaagcggcagccaaaccattacgctgtcgccatggggtgtcgatgatccgctgctgagcggcctgccggctacattccccgcgcatctgagccatttgcaaaccgtgactcgtctgccggaaggggccacggtgctggccgcgtcctcccacgatccccaccagattgtgcgctatgggccgcacgcggtctctacgcaatttcacccggaatttaccgcgccgatagcccgttcgctgatccgccaccgggaggcggtgctgcaggcggaaggtattgacgcgcagcggttacacgacgaggtgcaggagagcccgcagggcgcggcgatccttacgcgcttcgtcagcgcctttctgaccccttatgcccccggccattaatcccctgtcgtgaacagcacctgccagcggcgacgccggcgggtcatttcgcgtgccagatcggccacctctgcaacgcgcagcgcgtcaaccgcctgcggcgttagctctggtaatccatactcctgacgcagggcggacagcgcccgcgcctctggcggcctgctggcgcggatctgagcggccaggcgctgctgtagcggtctgaaggtcgcctcatccatgggggccagctggcgcagaaagtctttaccacagcgcagcaattccccggcgcggcgatccggggactggagcgccatcagcagcccgtcgcgatcggcgacccgctgatagcggcagctcaccacatagccaatctgctgctccacccgcaggcgctggaaaaatagcggctcacaatgctgcgccagcagccgcagggccgccagcgaggcgccatccggcagcggaatgaagaccagcagcgccgtatcgcctcccggataaaccagacgttcgacgccgcggcggcagggtgccggagcgggcatcggcggattaaccggggcggtaatcaggctcagctgactcgctacccactgcgcatcttctgcgctgccgccggccagggccgccagccaacctttctgatgcccggatgtacccagccgttcggggagttgagccatgagatgacggatagcgatactttccggcggtggggtcagcgaggcgaccgggagcgcgagctgccgcaggatggcctgcaggatcgcttccggccgtcggcctggctccggcagctggagggtcaactgccagctgccgtcgaacagatgccactcgccgtgtcccccggcatggcgcagggcggcaagcagtgggcgcagctgttccccacgcgccagtccttcggcctgatcgggcgagtagtagaagggcggtcgcagcaggagcctcggcggctcttccggtaacgggagatggagcagcggcgcggctttctccgggcatttggcaacgagatcgccagcggcctgcggatagaaagcgaacgccagcgccgggtcagactcagggcggcggcgccagcggctaagcggcaggctaaagccctgggtggcaacaggctcccatggggaaacggtttgacaggccaggctgaccgacggggcggcctgcagggcggcgcaaaaatcggcgaacccggcgggcggcgcgccgggggcaaagccgaatgcccgctggcgcagctgatcgagaggcgacagcgcctgaaagcggcggcgggatagctgatagtagtgttgctgctgctcaggcgtcgtttgctgtagcgcctgcagccagtgggttatctgccggtcgacctcttccggccggtcgctggcgaagaccagcgccagccagccgaggtaccgatcctgatacagccagttcagcgccacatccccggccagccggcgctggcgcaggctggccatcaggctgccgggggcttcatccagcaaaaactcgcgcagtaacgtgacgttgtcacttaaagcgatcagcgggcagcgccacagcgcgggctggctggagaccgccagctgcagtgcagtgaactcgcccaggcgcagcggcggcgccggcggcggaggctcgcctgcggcaagcccggcggcgaaacgggccgccagctcgccgagcgcctccagcgactgcggtccctgcagccagagctgcattcgccgggcgacgtaatgggtgcggtgaaaatcgcctaaggcggcctgcagcgcagcgagatcgcccgccagcgcgtcggcgctgcctacctgaaagcggcgaaacgccgcgggcgcgctggcggcgtggcgcaccgcggcttcccggcgcgatggctcatgctgctggatcaggcggtactcggcgtcaatcaccgccacttcgcgctgaatatcttccctgagcagcagcggggcctgcagcatctcctgtagacgcgcgacgccatcagccagagcatcggcggcaacctcgaaaaagaacgcgctatggcgagccagggtggtggcattcacgcttccgccctggcgctgcacccagcccatcagtcggtcatcatcctggtagcgctctccgccgtaaaacagcaggtgttccagcaggtgcgccagcccagggaagcgcgacggttcgtggtggctgccggcggcgacccgcgccagggcagccgcgcgatccgcctgcggctgatggaccagggtggcctgcaggccgcccggcaaaatgacggtgcgggtcgccagcgtcattacaggtcccgggtttggtagatcagctgcgagcgggtacggttgcggaactgcagctggctgacttttatgtcgctgcaggccgcttcgcgcctggcctcgaggattttgtgatgatgcggggatttgctgcacaccgggtcggcgttatcggcgctgccggtcagcataaaggcctggcagcggcagccgccgaagtccttctctttttcatcacaggagcggcacggctccggcatccagtcatacccgcggtagcgattgaagccgaatgagtcataccagatcgattccagactctgctccagcaccgacggaaatgccaccggcagctggcgcgcgctgtggcaaggcagggcggtgccttccggggtgacgctgaggaaaatcgatccccagccgcccatgcagcctttcggccgctcttcgtaatagtccggggtgacgaacagcaggttggtgagcttgccgctggcggccattttctgccggtagtcagcgaccacctgctcggcgcgggcgatctgttcccgggtcggcagcagcccttcgcgattaagaaacgcccacccgtagaactggcaggtggccagctcaacgtcatcggcttccagctcaatgcacagctcgataattttatcgagctggtcgatgttgtgccggtggagaacgaagttgagcaccatcgggtagtcgcgcgctttcacggctttggccatggtcagcttctgctggaaggcttttttgttgccggccagcgcggcgttgagcacttcatcgctggcctggaagctaatctggatatggtccagcccggcctcgctgaaggcgtccagtttgctctccgtcagccctatcccggaggtgatcaggttggtatagaacccgaggtcgcgcgcggcgcggatcagctccggcagatctttacgggtcagcggctcgccgccggaaaagcccagctgaacgctgcccatcgcccgcgcctggcgaaagacctcgatccattgttcggtggtcagctccttatcctgccgggcgaagtccagcggattggaacagtagggacactgcagcgggcagcggtaggtcagctccgccagcagccacagcggcggattgacggtgggtttactctggttcacggcaggtgatccacttctgttgacaggcgatcttcaggaactcgatgacgtcgtcatcgacgccgccggcttccgggaaacgttcattaagcatggcgataatcgccgcgacgtcgcgccggccatcgaccagctcgaggatcgccgcggcggtctcattgagtttggccataccctccggatagaggatcacatggctctcctgggcggcttcccactgcagtcggtagccgcgacgaaaggcaacgatggacgttttctgcatgattacaccagtcgggtcgtgtgccaggccgccttgtcggtgaccgtgtgatagggtgggcgctgcagggcataggccatggtcatggcatcgagcatcgaccacagaatgtcgagcttaaactgcaggatctccagcatccggttctgtttttcagcgctgtcgcagtaggccttggccagcgccaggccatgctcaacgtcgcgattggcctggctcagacgactgcggaagtaaaagtagccttcctctttgatccatggataatgctgcggccagctgtcgaggcgcgactgatggatctgcggggcgaacagctcggtcagggagctgcaggccgcctcctgccagcaggcgcgacgagcgaaattgagataggcatccactgcgaagcgcacgccgggcagcacgtgacgctcgctgagcagatcgtcgcggctcaaaccgaccgcttcccccagccgcagccaggcttcaatcccgccgtcctcgccgtggctgccgtcgtggtcgaggatccgctgcacccatttgcgccgggtttgcgcatccgggcagttggccataatcgccgcgtctttcagcggaatagtggtctggtaataaaaccggttcgccacccaaccctgaatttgctcgcgggtcgcgtcgccgttatgcatggcgatgtggtaagggtggtgaatatggtagaaggcgcctttagcccgcagagcctcttcaaaggcctgcggcgacagcgtgtcagtgatcagcatgcggtatcctgaagggtgattgccatcccgtcccagctcacttcgatcccctgttgcgttagcgcctggcgctggggagactgctcgttaaggatcgggttggtgttattaatatgaatgagaattttgcgttttgccggcagagaggccagcagggccatcatcccgtgctcgtcgccgagcgccaggtggcccatatcgcggccggtattgcgtccgacgccggcggcctgcagctcgtcatcctgccaaacggtgccatcgatcagcagacagtccgctttttgcagccacggcagaagggtttcatccggctcacccagccccggggcatagaacagcgtctgcccgttgcggcggttttcgataaacagcgccacgttatgacccggcagcggccggtcgcgatacggcgaatagggcggcgcgttgctggcgataggcaccgcggtaaactgcaaatcaggacaggcgtcaacggtaaaaggctgctgcggagcgatgggatgatgcaccaggccgccgttccagtgccgcagcatggtaaacaccgggaagccggtggagagatcctcatgaacctccggggtgcaccagacctgatgtgggcagccttcccgcaggctcagcaacccggtggtgtggtcgatctggctgtcggtgagaataatgccgccgataagcgttccgcgcagtacgccggctttatttaactcgggggtatgggcaatctgctggctgatatccggcgaggcgttgcacagcacccactctttaccgttgtcgctgacgataattgacgactgggtgcggggggcagcctgaatggtgccatcgcgcagaccctgacagttggcgcagttgcagttccattgcgggaaaccgccgccggcggcggaaccgaggactttaatgaacatgaagacggaccgggtaatgaatgaaggtgcccgcgcgaacggcgggcggggcgattaacggttagaaatgtacagcgtcacttccagaccgagacgtaaatcgataaaagcaggtttcttccacatgttttgttcctcttaaaaatgactacaggcctcacggataatggtggatctgtgacggctgccgcatattgcgcttcaccgggagagagatcaacccggaatctgtaaggaattaactttatgtttacaatataacctattgttgccaaacattttttaatacccgtagccagttacgccacagcagcttatccagcaccaattgatcatagccgctagcgcgcaacgtattgataagccgcggtaagccggccacatcgcccagctcgtccggcagggtgatgccgtcaaaatccgagccaagggccacatgatcctcacccattatgttaataagatagtcgatatgccggacaatggtggttaagggcgtgtcgctatcgcgccggccgtcggcgcgcaggaaagcattgccgaaattgacgcccaccacgccgccgctgtcgcggatcgcccgcagttgctggtcggtcagattgcgcggctgcgggcacagggcgtgggcattggagtgggtggccaccagcggtgacgttgagtgatgggcggtatcccagaacgctttttcattcatatgagacacgtcaatctgcatcttcaaggcattggcctgcttaatcagatcgatacctgacgcagtcagtccaggcccagtgtccgggctaccgggaaacgaaccgttaacgccgctgccgaagcggttcgcaatattccagaacggaccaatgctgcggaccccggcggcataaaaggcctgcaggtcgcggccctcgccatcaaaacctccggcaccctcaatatgcgccaccatcgccagtaccttatcctcgcggcagcgctcgatatccgccgcgctcagacacaatctcaagcgtccagcggagtgggcgataagttgcttcaggatggccagttgctgccagaggatatcgatcggatcccatcgttggctggcgtattgcggcgtcatacgggcaatatattcctgcggtggcacgaatagcgcgaatagcccgccggcaaatccgccttgcagcatgcgcggatagtcgagatggccgttctctatcccggcaaagaaggcgctcaccggatcctcgcgatggtgaagccagagattcagcagcaggtcattgtgaccatcaaaaatcgccatagcgggttcctgcgttcttaagtggtgaaaaatgcctgccacggtaacggatttatctcccggggcaagcataaattcacatgcccgcaacaattgccaacctcgactttgtatcacactgtatctcgcggcgcagcgctgacattaagagataaaaatggccccggtcgggcacatggcggatacaaatttccgctttactggtcacgtactctcttgatgacgataaaaggtgagaaaacgatgaacagattatccctagtccgctataccagcgccgtggcgctggggttatccaccctgtggtccgccgccgtttgcgccgctgaagacgcgggggcgttcgacaagatccagcagatccgcgccggcgacctgaatattggctacgtggatatcggcccacgcgacggccagccggtgatcctgctgcacggctggccctacgacattcagagctatgcccaggtggcgccggctctagcgcagaagggttaccgggtgatcgtgccgtatctgcgtggctacggcacgacccgtttcctctccgccagcacgccgcgtaacggtcagccgtcggcgatggcggccgatattgtccatctgatggacgcccttaacatcaggcaggcggatctggccggttttgactggggcgcgcgcacggcggatatcgtcgccgcgctgtggccgcagcgggtgaaatccctggtctcggtgagcgggtatctgatcagcagtcagcagattggcgaaaaaccgctgccgccgcaggctgagctgtcgtggtggtatcaattctattttgccaccccgcgtggggaggccggttaccggcaaaacacccacgactttgcgaaatttatctggcatcaggcgtcgccgcagtggcaattcagcgatgcgacctttgccaaaaccgcccgggctctggataacccggaccatgtggcgatcaccatcagcaactaccgctggcgcctggggctggagaaaggggaagcgaagtatgccggctatgaacaacggctggcggcgctaccgccgataaccgtgcccaccatcaccctggaaggggcgaataacggcgcgccgcatccggctcccgccagctaccgtgccaaatttaccggtaaatatgagcaccgggatctgccgggagcggtgggccataacccgccgcaggaggatccgacggcgtttgtgcaggcggtggtggacgccgatcgtttgtaacccgcgccttgccggcggcgcgacgttgcgcttccggcaacacggcttatgcttgtgaagagtttattttgccgcaggagcagcctttggagcgtattgaccacatcctggtcgtcgacgacgaccgcgacatccgggaactgatagtcgactatctggaaaaatcgggatatcgcgccagcggcgcggcgaacggcaaagccatgtggtcggtactcaaaaaccataaaattgacctgattgtgctggatattatgatgccgggcgaggatggcttaacgctctgtcgccagctgcgcgccaacccgcagcaggatatcccggtgctgatgctcaccgcccgcaccgatgacagcgaccggatcctcggcctggaaatgggggctgacgattatctgattaagccctttgtggcccgcgaactgctggcgcgcatcaaagccattttacgccgcacccgggcgctgccgcccaacctgcagatcaccgaggcgggcaggctgatcgcctttggcgactggctgctcgacactgccgctcgccatttgctggacgacagcggcgccatcgtcgccctcagcggggcggagtatcggctgctgcgggtgtttctcgaccatccccagcgggtgctgaaccgcgatcagctgctcaatctgacccagggacgcgacgcggaactgtttgagcggtcgattgacctgctggtgagccgactgcgccagcggctacgggaggatgcccgcgagccggcctacattaaaacggtgcgcagcgaaggctatgtgctgtcggtaccggtctccattcgcgagaggcatgaatgaggttctggcccgcctcgctgcagtcgaggctgatggcgctgctgtttctggcgctgctgctggcgaataccttaaccctgtcgctgctgttttatgagcgtatgagcagcgctcgcagcgtgatgctgggcaatctggcttccgatgtcgccaccagcgtggcgatccttgaccgcctgccggccgctgagcgcccacaatggctgccgaagctggcgcgcggcaattatcgctatctgctggacaccggggagcgcggcgattacccggacagctggcgcgcccgggacgcagcgcgctccctgcaggaggcgctgagcgcgcagtatccggtaagtattgtggcgatccccggcccgcggcagcatattcaggcccatattacccttcacgacggcgcgccgttgaccctcgacctgtggccgaaactaccggccatcgcccgctggctgccggtggtgctgatcgctcagtttgtcctcctgctggcctgcgcctggtacgcggttcgccaggtattgctgcccatctcccgctttacccacgcggtaaatgccctggagccggccagcgacacggcgggaactatggccgagcaggggccggaggaggtgcgtcgcgccgctcgcgcgtttaacgcgatgcaggcgcgcatccacgatcatctgcaggagcgagcgcggatccttgccgccatctcccacgatctgcaaaccccgataacccgaatgaagctgcgggtggagatggccgaccagccggaactgcgcgataagctactgcaggatctcgacaatatgacccgtctggtgcgggagggcatcgccttcgcccgcacctcgcagccgctggaggaggcgcgacagcggctgaatctcgatgcgtttctcgacaccatcgtctgcgattatgctgatgtcggccggccggtccagttttgtcccgaagagaccgccggggtggtgtggatcccgccgcaggctctgcgccgggtgatgactaaccttatcgataatgggctgaaattcggcaccacggtcacggtaaccctgacccgcgacgccgccggggatgtcaccctccatgtactggatgaggggccggggatcccggaggccgcgctgcaggcggtgctgcagccgttttatcgcctggaggactcacgcaatcgcgataccggcggcaccggtctgggactggcgatcgccgcgcagctggtcagccagatggacggcgcgctgcgcctggccaaccgcccgcagggcggcctggacgccagcgttcgccttgccgcggcgggattgtatcctgctgtatctccggggaagacggataactaagccgacaattctccccctttcccgacacattagtcttacatggccttgctgtaatgtcgtggctgccactctcggcagcgacggcataatgaggagaaggcgatgtcgatattaattgcatttttgggcggaatgttaaccctgctgagcccctgtacactgccggtgatcccgctgctgttcgccagcgtccggggccgccgggggcagctggcgatcatgctggcaggaatggcgctgatgttcggcgctgtctcctggctggtgacggtcgccagcggctgggtggtgaatctgaccctcgcaggccgcggtctggcgctggcgttcttcgccctggtcgggctgagtctgctttcgcaacgcgtcgcgcaacggctaacctcacccctggtgacgctggggaatcagcttaacgacgccagttcacgccagcgcggctggatcggttctctgctggccgggctggcggtgggcctgctgtgggcgccgtgcgccgggccggtattgggagcgatacttagcctgggctttgtgcatccggggcaggcgactaccggcggcttgctgctggcctacggcagcggcggggcgctgatgttattcctgctggggtggtgcggggcggcgttgatcaccagattgcgtcgcggacaggcgttcggcgaacggctgcgccggttggcagggggggcaatgctggcctcggtggcgctgatcgccagcggcggcgatcgctatctgcagagcgctggtggactgagccaggcgctggagcagcggctggccgcccgtctgccgcagccggagcaaaagaccagcctccagccgatcgccgcgccgcagcccagcagcgcgatgccctctctggcggggggcagcgcatggatcaacagcccggcgttaactccggagcgtctgaagggcaaagtggtgctggtggatttctggacccgggagtgtatcaactgtcagcataccctgccttacgtgcgcgactgggcgaacaaataccgcgcggcgggcctggtggtgattggcgttcataccccggaatatccctgggagcgttcgttgcccctgctgcgccaggcggtgaaggactggcggataacctacccggtggtggcggataatgagtacgccatctggaacgccttcggcaatcagtactggccggcgcattacattttcgacgctcgcgggcagctgcgttataccgccttcggcgaaggggattatgcccgccaggagcaggtgatccagcagctgctgcaggagagcaaagcctgacccgcggcgcaggcgtctggcggacggaaccctccagcccttatacctgatgccgggcggcgctgcgcttgcccggcctacaggagcgcgcagggagaatgtaggcccggtaaggcgcagccgccaccgggcattgaagcgggagaggcgcagaatgcccattgtcggtggctgccgggcggttcccttcatcccttgtgcccattgccgggcggcgctgcgcttgcccggcctacatgagcgcgcagggagagtgtaggcctggtaaggcgcggccgccaccgggcattgaagcgggaacggcgctgggctgggctgcgcttgcccgggagacagaatgtggagtggggtaacagatgctgccgaacggttccctctcccttcagggagagggttagggtgaggatgaatggaaatggcgtgacactgtcacctgtcgagccatccctgcagggcctcggtcatcagttcgccgagcagcgccacggcggcggaatgcgattcctcacgcggggtttgtcgcaggctgatggccagacttcctggcgctggcaggagtcctcctgcggggcgcaggttgcctggcatgccgatgcgggtgcgtatcgtcaggcccagcccggcctgcaccgccgcccaaatgccgctcaggctgtggctgacgaacaccatctgccaggggatccccgcggcatcgagacaggcaatggcgcgggagcgcatcaggcacgggctgtcgaacatcaccagcggcagcggctcgccggagaccagcaaagcgcgaatatccaggtcaggatgcgcaatccacgccagcgggcagaggcccagcccggaaccctgatcttcgttttgccacagcagcgccagatccagcgcctcttccgccagcgcctggtgcagcggaccattgcgatccaccctggcgactatccgcacctgcggatgatgccgtttaaattgcccgaggatccccggcatcagcgattcgccaaaatcttcctgcataccaaggtggatctcgccggtgagccgctcaccctgcagcgcgcgcagggtttcatcattgagcgccagcaggcgtctggcgtagctcatcagcttttcgccttccgcggtgagcaccagatgccgcccctgtttggtcaccagcgccgcaccgcactggctctccagctttttaagctgggcgctgaccgcggaggtggaacgcgacaggcgcagcgctgcctgggcgaaactgccgcactccatgccggtcacaaagctgcgcagggcgtcgagatccagccctggtaagcgtttctccatcatcatccccattttcaggacgtttatcctgaacgttgttatttgcgggatagtactgtggcatcgcgagaggcaggggtcaacgggccctgcgaagagagcattagcggtgcggaaagaaataaaaaaaagccgataaggacattatcggcttattgcaggcaaggctgacagcggggcggcaggcgccgcctcgctaaggcaggttattgcgccagcagctcctgagcggtgcgctccaccaggttcagcagaaccttcacatcatccagcatcaccaccgggttcagcagagtcagcttcaggcaggtaacgccgttgtgctcggttacgccgacgttagcgcggccggaggccagcagggcgtcgccgacgcgctggttgagcagcgcgatagccgccgcgtcgctcccggccatctgcgccggacgggaacggaacagcacgctcgccagctgcggctgcatcaccagctccagcgtcggctgcgacttcacgtactccgccacgtttttcgccatcgtgacgccgtgatcgatgatcgccgcatactgtttctggcccagcgcttccagacccatccacagcttcagcgcatcgaagcgacgggtggtctgcagcgacttagacaccaggttcggtacgccgtgttcttcatcgaactcggagttcagataggccgcctgataacgcatcaactcgtaatggcgcgcgtccttcagcaggaatgcgccgcagctgatggtctggaagaactgcttatggaagtccagggtaacggaatccaccagctccagaccgtcaaggtagtcgcgatactgctcagacagcagcagggcgccgccccaggctgcgtcaacgtgcagccagatctgatgttccgcagcgataccggcgatgtcgcgcagcgggtcgatagcgcctgcgtcggtggtgccagcggtggcgacgatcgccatgatctgctcgccgttagcctgcgcttgcgcaatcttcgcctgcaggtcggacacgtccatccgcgcgaattcgtcggttttcaccagcgttaccgagcggtagccgaggcccatcagcgccatgttcttctgcaccgagaagtgggcgttttccgagcacaagactttgtacttgcggatatcccccggcagcccatcctgttggatggagtgcccctgacgggcgaagaaggcgtcgcgcgccagcatcaggcccatcaggttgctctgggtaccgccgctggtgaagacgccggcgtcgcccgccggaaaaccgacccgggcgcgcagccattcgatcagcttcatctcgataatggttgccgacgggctctgatcccaggagtccatgctctggttggtggcgttaatcagcacttccgccgcctggctaatcaccaggctcgggcagtgcaggtgcgccacgcactgcgggtgatgcaccgacaggctgtctttcaggaagtactcgatcgcacgattaatcgccgcctggttacccaaaccctgttcgttaaattcaagggagatacgctcacgcagctcgtcaacgcttttcccctgatacatctcaggttgcttcagccactgcacaacggcctggctggtctgctcgataacctgctgataggcttcaacgctctgcgctgaaccagcaagaatcggattcaatgtggacatggcggtcacttactccactcagaccggttttacgccggcggccagcagggcctgttcaaatttgtcgaggaacacgtccagctccgcgtcgctgatcagcagggacggcagcaggcgcagcacgcagccgtgacgaccgccacgctcgaggatcaggcccgcttcgaagcatttcttctgcagcagggcagagagttcgccgtcagccgggtagcagcccatgtgatcctgcgcttcgttcggcttgacgatttcgataccgatcatcagaccgagaccgcgaacgtggccaatcaccgggtagcgtttctgcagctcggccagtttacctttcagccactcgccctgggcggcgactttgtcggcgatcttgttgtcgcgcagatgacgcagggtggtcaggccggtggccatcgccagctggttgccgcggaaggtgccggtgtggtgacccggttcccaggcgtcaaactgctttttaatgcccagcaccgccagcggcagcccgccgccaaccgctttcgacatcacgatgatgtccggctgaataccggcgtgctcgaaggcgaagaatttaccggtacgggcaaagccggcctgcacttcatcgacgatcagcagaatgccgtgctcttcggtcactttgcggatgcgctgcagccactcgaccggcgccgggttcacaccgccttcgccctgaacggcttcaaggatcaccgccgccggtttacggacgccgctctccacgtcgttgatcaggttttcgaagtagtaggtcagggccttcacgccggcttcgccgccgatgcccagcgggcaacgatacaggtgcgggtaaggcatgaactggacttccggcatcatgccattaaccgccgctttcggcgacaggttgccggtgacggacagcgcgccgtgggtcatcccgtgatagccgccggagaagctgatcaccgcggtacgaccggtgtattttttcgccagcttcagcgcggcttccacggcgtcagcgccggacgggccggtgaactgcaggcaatattctttcccttcgcccggcaggcaagagagcaggtattcggagaagcgatcttttaacggggtggtaagatcgagagtatgtaacggcaagccgctggtaatgacactttggatgctctgcaatacatcagggtggttgtggcccagagcgagagtaccggcgcccgcgaggcagtccaggtactgtttgttatccgcatccgtcagccacacgccttcggctttagtgatagccagcggcagcttacgcgggtaactcctgacattcgattcgaattcggcctgacgggccaaaaaggtttcgttgtttgcgtctaataaatcggcacgtaaagtatcaatacggactttatccgtcatcatatcactcccacaaccagcattgcggttgaacgctggttgaataattggtgtaagaaattgaattggcattcataaagcgcgcacaatatatggctttttaaatccgcattcaacgttttattgattgcgctattttgacgttattcttaccaggggcaaaattaacgtaacttgctgaattataatagaacaacgctctgtcactataaccctttaaagtgtaattattagtgagaaagtctctatatttttattgccgctacgttaaagcgctgacggaatgccttccgtcagcgatagcaagactcaatgcagttccaccgcataatttgttaaaggtgtaacttttttcaccaacttattgttatataaaaactgttcgtaagtctcgtagcgcgctttatccagcgctgccggatcggtggcgaacaggggcacggtttgcaaccacgcctggtggttgagttcggtcctaagctccgggtgggcggcggcgaacgcctcccagctcttctgtggatgggcgcgcagatagcccactcccgcctgcagggcggtgaggaatttacggatcttcgcctcatgaattgcgtcgcgatgggcgacaatcaccagctcgtcataggccggcacgccgtaatcttcgacgttcatcaccaccggcgttttgccctgcagtttcagctcctgcgcttctatattacgatagccgccgataaccgcgtccacctggccggccagcagggcgctggtcagctggaaattgacgttcaccagtttgatgctggccggatcgatccccgcatgttgcgccatggtcgccagggtggcctgctcaattccgctgaccgagtagcccaccttcttgccttgcagatctgccggggttttgatctgcttatccagggcgataaccgtattcagcggcgaattaatcagagtccctacacgcaccagcggtaacccttcgtcagcaaagaagtgcacctgcggctggtaggtgatggccagatccgcttgacgggcggccaccatgcgcggaggcagcgcgggatcggaaggggggacaatcctgacgtccagcccctgggccttaaaggcgccgatctgctcggccaccataatcggcgcatggtcgggattaatgtaccagtccagcaccagcgtcagcggttcattggccagcgcgtggccgctgaacagggccgtcaaggttgccccggcgaatagcgactttttcatctgttttcctttattacgtcattcttattccggcgaccagtcgatcagccggtgtagcagggtatctaccgccagccacagcaggagggtcagtagtactaaaataaacagcgcggcgaagcagatatcggtttgcagtcgcgcattggcgttgagcatgacgtagcccagcccctcggcggagccgacccattcgccgatgatcgcgccaatgggcgccaccgccgccgccatgcgcaggccagagcccagcgccggcagggcggccatcaggcggacatgtcgcagttgagcgccgaaggaggcattcatgctgcgcgccagatcgagatactcctggttgacccgccgcaagccatcaaagaaggcggaagtcaccggaaagaaaatcaccagcaccgccatcgccactttggcgctcatgccaaagcccagccacagcaccagcagcggggcgagggcaaagaccgggatcgcctgactggtgagcaccagcggcatcagccagcgctgcagacggggggagaggatcatgcccagcgccagggtgacgccgagcgtcacgcccagcgccaggccgctcaggatctcactgagcgtgataagcgtatgccagccgagataggcgcgattaacccaaagcgcctcggcgaccgccagcggggacggtaaaagaaaatggggaatgccgctgcggctggccagaccccagagaagcatcagcccgccgaacaccataccgccgcgccagagacgtccagtcatggttgggccctcatcagctgctgcagcagggcggcctggccgatcaggagatcgggcgcgtccggcgcgcgcggaggtgtgccggcgaggtgatggctatcatcaatgtcgccgtctgccgccgagaggaccagcaggcggtggctcaaccggcaggcctcctgcggatcgtgggtgataagcaccaccgtgcgaccggccagcagggtggccgccagggtctgaatgcgcgtacgggtgagggtatccagcgccgagaaaggctcatccatcagcacgatggggcaatcctcatacagcgtgcgcgccagcgcggcgcgctgacgcatgccgccggagagagtcgccggccgggcgtcggcgcaggatgaaagctcaacctgttcaagcagggcggcgacccgggcacgatcgactttttcaccgcgcagccgcgcgccgagggcgacgttgtccctaacgctcagccaggggtagagcagatctttctgccccatccacgccagacggccctgaatcggttgcccatcgctggcgaccacttctccgcgggtggcgggcgccagaccggccatcacccgcagcaggctggttttgccggcgccgctggcgccgagcagcgacacccactgcccgccggggaccgtaaacgacaggttgtcgaacagccgacggtcgccgacatgcaggctcaggccacggacctcgatacccggcgccgtcacgcccgggtctccgccgcggcgttgaggcccatctgccagaactgcgcctcaaggcgggtggcggtggtgaaaatctcgctcagctcagtgattcgcgcctcgctcccgcgctgctgccacaccgtttccaacagcgccagcgcggcgctgacgccctgcagatagccttcatcgccatagttgcggatccatgaggcgtaggggttatcgtccagtcgggtggcgggatgttgcagcaggccgagaccgatttcggcgtagcccgcgacgcagggcatcagggcgaccagcagatccagcgcgtcacccgagtggccaatatccagcacatagcgggtatagttgagggtttcgggggcttcaggttgggcggccatctccggttcgctaatcccccactgggcacagtagccgacgtgcagcggcagttcgttgaggatggcattcatcgaggcggccgcggcccgcatctccggcagcgtgcgcagtttactcaccagcagcgcgtagctgcgggcaaagtgaatcagaaacagataatcctgggtcagatagcgacgaaaggcgttttccgccagcgtcccagaggcaagttgctggacgaaaggatgcgccacatagcgctgccagtcagcggcggccagctggcgtaaacggccgtaaagaccttggctaaaagcgggaacgatcacaggacctccatttattcaggggagatccgggcgtgcaggggtgtgaacaggcaatggcggtaatgctggcaaaattgccgacccgtcccttcgctggcatgacccagatcaggttcaaagggttcggcttgcgccatctcagccctcacgggacacccctcggtagcgctatgttatacgacattcaccttttgaatacaatcaccgcgccaccttgccgcaggatgatggtaatgggggatagccagcgcttttccgcgcaacaactactaaccaccgggccgcgacgaacggaagagcggcttttacgcgcgcaatagtttcgttgtcggcgctgaataccgtttttaactaaaaccgcaggcgctatctgccggtaagatgcgcgcacttttattgctgtggagaggctgttgatgcgtaaagccttctggctattattcgcgctggcgctgccggcgctggcgcaggatccggtgctacccgccgtgacggcgatccatacggcgcccaccctcggtgagctgccgccgccggagtcgctgcgaccgtgctgcgcttttggttacgacctgcacgtgcgcgcggcgggcattccgatcccgatgtaccagatcggtaatgtgttgactctgggtacgctgggtaagcaccattacaacgacagcgcgttcggtgcggtgaaaaatctgctggggctcagcgaggagcagaacgggcttatctatacccgccgcggcgggtttattgatatcgcccatgtgcgcgatacggcggacaacaccttttatctgttcaatcgtattgcgccgacgctgggtcaggcggggcggatcttctacagtgaagaactgggcgtgcgccgcgtgcagctgaatgcctttacgccgccggcgggcgtcaggcagcgctatcagctggcggcctggctcgccgggcatctggccttcgaaatcgcccagtggcatgagatcgcccagtggtatggcttccagtcggtccccgggttttccgaagagatttccgctttttcgcccgaggatctctactccaatttactgggcgcgaggctggcgattaatatcatcctcagcggccacggcggttcgctggaggattataaccaggccatggatgcggcgctgaaacaagtgctgacccggctgctggtggcgacgcgcggtgagacggaagcgatgtttcagcagatcgacggcgactggtggaacagtcaccggcgggtgccggataagtttctggtactgaagcgtaactacgatctacaggaaaaccggctgccgacgccggtcccattcgaaaccatgccgccgtatcgcctgaccatgccggagcaggtcgggggattccgcttacgcgacctcggcgaactgcagatctatccagggcacgatatgcaggcattgccggttcccgcgcaatactatggcgccggagcgttccaggggctggcggaccgcgcccatgaggcggataaaacccagctggcgcggacagaaaaatagccgtaaaggctcaggacgaacgccctgagccggcgagttagcggaagtcgacccagcaggcaccgttgtcggcagaacgcacgcagttttccacccagcggacgccgaacgccccggcgcgggcgtccgggtaccagaagtcggccagcagcgcctcgtcgcgacggtcggcggcatccatggcgatggcgaagcggcgatagagattcgaccatgcctcaaacagtccctcgggatggccgccgccgatgcgatcatcctgacgcgccagcggatcgagatagtctataccgcgctcgaggatgcgcacgggttcgccctggatttcgtagcgtagctggttgggctgttcatcccaccattcgagactggctttttcaccgatgattcgcaccttttgcccgtgcatcgaaccgcagttgacggcggcgctccacagtgagccgatggccccgttgtcatattccatcagtacatgggcgttatcttccaacggtgcgcggcttttgacgaagctttgtctggcgcacatcagccgggtgatcttcagctgcggggccatggtttcgaccagaaacagcggatgggtggccaggtcgcccagcacatagctggggccgacgaagcggggatcgacccgccagcgggtactggcgttttcctgttccaccggctgggcgtgaaaaccgtgggcaaactgcatattaacgatacggatatcgcccagcagcccgtcggcgatcatctgccgggcctgcaggatcagctggtggccggcatagccgtaggtcaccccgatgatcttgcgccgccgctggctgagcgccaccagctcgtcagcttcctcgctgctgaagcacagcggcttttcgcacaccacgtgcagcccggcctccagcgcggcccgacagatggcatagtgggtgttatttggcgtggcaactgacaccgcctgaatgccgtcaggccgggcagcctcgctgcggaacaggctttgatagtcggcgtaacagcggtcgggatccacccccagccgttggccgaactggcgtccgcgctcgccatcaatatcaaaggcgccggccagcagcgtgaaggtgttatcgcgcagcgctgcagagcggtgaatatagccgatctggctgctgccgccgccgccgaccatgccccagcgcagggtgcggtcgagaggttttaaaccgttaatcatgtcgtgcctcctgtcagaatccgacgtcgcgcagatagcgcagactttccgtgaccgcctgcaggctgcctgcggcatggcgcgggtcgcgctcttgttcaatggttatccagccctgatacccacggcgggcaagaaagtctttgatagccggatagtcaatggcgccgctgccgagcgggcacatcaccccttcggcgcaggcagtgaagaagtcgataccttcatggatagcgcgctgataaacctgcgggtcgacatccttgaagtgcagatagtccaggcggtggtaatagcgatccagccagtcgagcggatccatcccggcgtaatagagatgtccggtgtccagacacaacccggcgacgtcgtgcgggatatcgttggccagccgctcgatctcatccgcgaattcaatgctgcccccggcgtgcggatggataaccgcccgcacaccgtactcctgccaggcgagggtgctaagggcgataatgtgctccatcatgcgctgccagtctttgtcattgaggcgcggagccagcgcgccgcgcccggcaaagcgcgcccgttcggggttgccgaagtcgataatcaccagatagggcggctggaaagggcggcccgggatcggttcggcagcggctacctgcgacagattgcggcagatttgatgggtcagcgccacaagggtggggaaatgggcctcgctcaccagatcgtcaaagatcgtgccggcgaccagcgacagctgatgctgctccagcgccgcgcgcaggctggccggatcggtggggagataaccccaggggccgagctcaatgctgcgatagccagcctgcgccgcctccttcagcacggtagcccaggcagggaggttagggtttttcggatcatcgacgccccagctgcagggggcgttagcgataggatgtatcatgtcggcttcctttttcatacaagggatgccgctgagtattgaataaagatttcattatcaacaatgatggaattttgattttatgataatcatcatgattttaattgatggattttttgataattttttatcaagtcgagaggtggcgcggtcggcccgataaccgtctccgctggagacggagccggaaatttacatattttctttggtggtgatatcgaaaggctgagggagtgaaatcacctcgctatgggggtgtgaagcggcgtccgccatggcgcgcagcgtaacggcggcaaactcatccagccggtggttaagcatgatgtcgatggtgccatcgatcagggccagttcactgtcgctgagcggaccgtggcagaccagagcgatctcctgctgacggccgctgtcgcgcagcgcgtcgacgatcccttcgacgccgccgcagggggcgtagatcgcctgcagggccgggtactgagtcagcatctgttccgtcacggtcctggcgatatccgcccgttcatgactgcgaaccggctcaaggatctgttgccccttgccctgttctcgcaggcaggagcgaaagctgatctcacagctttcctggcaggtaaaacgattatcgccaatgataatgccaatttcgccattcccccggcataagcgctcgataaaccaggcggcggtgcgcccggctttatgattatcgaggccgatatacccgctgcgctgggggaccgatagatcggaaagcagggtgaacacgcgcacgccgcgggcggcggcccgggccaccgcgtggcgaatcagcgggtgatccagcgccaccaggccgagcacctccacttcatcgctgagtcggtgaatggcctgagccatctcttccaccgcatcgatggcaaaatgcagtatcaccggcgcctggcccgccggtagccatggggcagcctcgcgcgtcagcgcccgggccaacggcaggtagaaggagtggctctcctgcagcaggataaagcccattctgatcgtgaccggcgctttgccggcagccaggcgatagtggggctgctcgagggtaaaacccagccggcgggcggcctccagcacgcgccgcgccgtggactcttttaccgccgcgcgcttattgagcacccggtcgacggtggctacgccgacgcgcgcttcatgcgcaatgtcggcaagggtgattttagtggcgatttttttcaaggtaattgtcgctatgaatgagcgtaatgatagaaactatcacggttagcctgggcagaaaagcgactctctgcccgccctggcctatgccgctgcgcctgccgggtaacccctgttggcgatgcacactctgtgatcaaaagcgactacccgttctggcattgctgctatgctgttgaaataaaattattattaaaggcagcatcgcttctgttggttaaactgcgcgcaaagtcaccctcagagggctttactgggcgcataaccgactatacttggcgcgctcgcgcgtaattgcggtttctcggtgtctattttgctttcactttaaaccagcgttggggctgcacagcgataagtgccgttccgcgccggcagtgggtcggtttggggcctgtatgttattaaaagagctggctgtttttgaggtcttaagcaccccgatatgggtagttcatccttttaacgaaagggtggtctatgccaatcaggcttcccggacattgagcggcgagatgtcgctcaatgagatgcgtaacggtatttattccacctgtccggaaacgcaactgcagcactaccttcgctatctcgacaccatgagcgagatattcgaagtctggacgttacccaccgccaatgggttgcagtcggtgtattgcaaaaccaccctgattgataccgaagactgtggttgcttgctgctgtttgaagccgtgaagctgctggcgcaaaatcagtcgattcataccggctcccgccgctaccagcggcgtaacaatggctttttcgctcgcttttttatgaccaataccgcgccgatgctgttgatcgaccctcataaagatggccggattgtcgatgccaatattgccgcgctacgtttttatcattattccgatgaggaaatgcgcaccaaacatacctggcaaataaataccctgggccgggacgttatccccattatgaataatattgccagtctgcctggcggtcataaaccgcttaattttacgcatattctggctgacggctcgctacgccatgtccaaacttatgccgggccggtggtgctgtataatattcgactgatgctatgcatcattcacgatatcaccgaagaagtgcatctgaaaaaagagctggaattttccgccgcccacgatccgttaaccggcttgcttaatcgccgggagtttcaccgtctggttgaggcgccaacttttatcccccggggttattgtctgctgttaatcgatatcgatcatttcaagagcattaatgatattcacggccatcaaaaaggcgatgaggtcctgctggtgctctctcgtattctggaaacgtcggtcgaccgcgaagataaaatttatcgctggggtggagaagagtttctgctttttttgccccattcgccgatcggccgcgcgctgatactggcggaggggatccgccaggcggttagcgaataccagacgctgtcggtgaccgtcagcatcggcgtggctgaacatcatgacggcgaaacggttgatcaactgttttcccgcgtcgataaagcgctgtatgcggcaaaaaatgatgggcgtaatcgggtctcgcgcatgccgtttgaaaatgtggaactgctgcatagccgcggaggcgcggcctgaccagcccgatgctttttctccccgccggacgcgcaggttgactcaccgactatactgagtgaacgccagcctgctgatttaggtggcaatattgttagcctgtcgctgaggtggcaaacgacatatggtgcgtcttttcgttctcctgtcggtactttcgctttccgcgccagcgacgctggcggcgaacggccacgccatcaaacagcgtgccgatgccgtattgactctgatgagctataccgtcgtccctgacgtgaccgccagcgatctcaacattggttccggcagcaacgacaaacataatctggccatcacccagtttggcggcggggcaaccctcagcgagtcgtttcctctgtaccttgaaggtacgatgggttacagccgttacgacccgcgctttgtggtcagcaatggcgaacagacgcggaatgtgccgaccaaatggaacagtctgaccaccaccggcggcgtcggttgggatttttcgctgcaccgggacagcctcggaggcaacctggtgctgcggccgatcgtcaatgtgatgctcggtaccctggccagcgatgcgcgtattggtagctgggcaattgagcgaaaaaccaacgccgatctgcaatttctcgacggcggtcggttcaacgcctgggggctgggcggggcactgatgctggattacgaacgcttctctgccacccaggatattgatgccgaactgcgttactcctatatgcatctgcaaagtttcggcagtagcgccgaggtggtgcagggcgaggccagcgcggagaatctcggcctgtatctgcgccgccgcgcgccgatagccgactggacgctgctgggcaacccactgcgttatgtgctggagggggcgcatactgaatttctcggcgagcagcgaggggcgctgggctttaccggtttgacctccttgggggttggcctcgagctggacagcagtaaatacccggtctttatcacccgcacccggctggtggcgcgctatatgttcggcaataacaccacaggctatggtgtaggcctggcaatgagtttttgatagtcctgcaaatgggccaattcaggcgcggtaacaataatcagaaacaggtaatttcgacttagccatgcttcagggtatgatgcgttgattttataaccattacattcgtgagggattatggcgaagggattctttctgtatcacctggataaaaccacctgtgggggacgcatactttcgggtgcgcctgatgacacttaccacattggcggcattgagcggcaacaggtcagggtgggcgatccggtgacctgcggtaagcacgaggggcgatttcgcgtctgtgggggaatgggtgacacctacgatgtcggtggatccctgaaagaatgggctggctcactggacagctacagctcttgcccgtgtcgtgctcggttcgttccgaccgtcttttctcactcctacgatagggactgcaatgccgggcgggtagctgaacgggcggaaacggcgaagaaaaaaaaccaacagcctgagcctgaacagcgtgcgcaggccgcaaagaaaaaacgggaaatcacactaaccatcggtgtgttttttgatggaaccggaaacaatgcgaataatagcggtgaccgtcaggccgcctgttccggcgaacatttcgggatgaatgacgccgatgcggtaacggcgtactctcagtgcgtgcgactaaagcatggctatagtggtactgccgcagggagctatattggctattatagcaatgtgcactggttgtatatattgtacaggcaggatatccgacccgatagcggagcaggccagcacgccatttatgttgaaggtattggcacggaagacggagctggcgacaatacttacggaatgggtactggtcgaggcgataccggtgtggtgagaaaaaccgataaggcagttgcagctctgactgtcggtattcaggaatatttacttcagcatgcaagcgatggttcctgcaccatcaaagagatacaatttgatatattcggtttcagtcgcggggctggtgcggcacggcactttgccaatcgggtattcagtcaggaccgtgacattatcacggcgattagagccggtttgaatggtattgaattctccggtgcaccgggtggtaaaacccgctttctgggcatatttgataccgtggcggcgatcggcaccccggttaacggctttaacccgcacagcgcagacacaggagatgtcaatctggcgctacgtccaggtgtagcggagaaggtttttcacatcaccgcgcagcatgaatgtcgttttaactttgcattgaacagcgtaaagccagcgtggccggagctggcgctacccggtgcgcactccgacattggtggcggctataatcccaacgagaatgaagcttatttccttacccgaccagagtttgaaaccgtccccttttccatcccggatacggaaacgcgtatttaccggcagacctgtgcaaaacttaaaaccatggacggctatccggcaatagctctactgctaaatgcggtagaggtgagcgtcgatacctggcatgacgacagaatgccagctgaccgttacggcacgctacagaaacgcagtggagcagctctggttatcaaccgtccgactttcaacgactggtcaaaagtggtattgcgggtgatgctcgatgcggcccaggatgccggggcggtgtttgaacctattcgagatacaaatgcacacttaaagcttaggcaagaactgaacggtttgtgtgaaaaagcgattgcgatgggccgagccataaggagtggtaagtctgccccaggctttaccacaccggaattgcggatgttggccgaaaaatatatccactgctcggccaactggaacagcgttatacgagacagtcggggtattatcagcggtgcggtcaaaccggcgaagctggtgacattcaccaaccggcctgatgaccgctggcagcgtaccgtttacgatatggacggaaataaaatatggaaataattcgtgcggcctgtctgcttccattattggcgctggctgcctgtcagggaaaacctttgcccaacaccgccatgcatagtgatgcgccaacagagtggagttttaactttttcacacccaaagcgttacccgccgtggtgacgtttgccgctattcttgacgttgatggaaatgactatcgctttaacacgctgaatagcacacccgatctgcctggcgtgatcggcgagtggaacgacaaagatcgtgcgccggtaggatactggaatcacgtaaagcgccctccacgacatattattttttgctgggactcgattattgataaaaaagtgtatgaaacccatttgacgatccctaaatcggtactggaacagatgcttatgccgagtaaatataaggattatcggggacgtattgcctggtacgacagaatgcaaattggtctggctccagaaggaaaagtggccgtctggttacagggaagtggatctgaatctaattaccgcgtcactccgtcagtcctgaaaaccgtatcaggtaataaattagatatttgtaaagatataacaaggagcgatttttcttatggatatgacaaagatattatagattttatcaaagggaagcactacccttacggtaactggtaaccagcctaatccccctgaaggatcttttaagatcctttagggcttggtgctgatttattgtcttaccgaaggttgtttccgcttctcaaacgggtcagtcctgacaccacacccgctcgccgttcacccacgtctcgctgatattgcgttcatcacccagggtcatcagcacgaacagctgctcataaatgtcatggcagcggcctatgcgcaagcgctgcagcggggtgaccgccgggtcaatcaccacaaaatccgcctctttgcccggctggaaattgccaattttctcctccagccgcagggcgcgcgccccgccaagggtggcgtgatagaaggcctcgctggcgcgcaggcgatagctctgcagttgtcctaccttgtaggcctcgcccagcgtccgcagcatgctgaaggtggtcccggctccgacgtcgctgccgatgcccatccgcacctggtgctgccagcaggcgggcaggcggaacagcccgctgccgagaaacagattcgacgtcgggcagaaggcgactgcggacccggtgtcatgcaggcactgccactcggcatcatcgagatggatcccgtgagcgaagacgctgcgttcgccagtgagctgatagtgatgatagacatccagatagcgcgcatgctcaggccacagctgtttaacccaggcgatctcctcccggttttcactgagatgcgtctgcagccaggtgtcgggaaactcggcccgcaggcgctgcaccgcctccagcaaccccggggtcgaggtgggggcaaagcgcggggtgatggcatagcccagcctgccgcgctgatgccagcggcggatcaacgcccgggtctgctcgtagctctccccggcggtttcgcacaggtagtcgggcacatggcgatccatcatcactttcccggcgatcaggcgcatattgaggcgcagcgcttcgctgaataacgcctccaccgatgccggatgcagggtacaaaacaccagcgcggtggtggtgccatggcttatcagctgatttacaaaaaactgcgctatctcctgggcatactccgcatcggcaaactggctctccaccgggaaggtgtaggtggtgagccactccagcagctgttcgccaaaggcgccgatcatctcggtctgcggatagtgaatgtgggtatcgacaaaacccggcaacagcagcttgccccgcaggtcgacatagcccttcagcggatgcagaaaggcttcaccctccagccatggcagcagggcgataattttcccctcctgcagaaacaacaggccatcatcgagatagcgagcctgggcggccacctcatccggggtctccgccacgccggcgatatcaaaaaatgcaccgcgcaccgcggtctggtaatccatcatcgaacctgccttctcttaacgctctgggaatagtgataaacagcaagattggtgccagtttgcagcctgccgcggccagacgccgcggcagaaggggaaggttactctttttgcgccaccgcgccggagcggaaggcagctttcgcctgcacttcgcgctcgtcgcgagccagccagcggtaggtggtggcgccgaggaagacgccgataaaccagctgaagttcgccacttcatgcagggccggaataaagctgataatcagccccaggcccaccgacggcagcagggcggcaatcgctttcgggttaaagccgttgcggtaccaatatttaccctgcggcgtatcgtcaaacagatcgtccactgacacccggccgcgtttgatcaggtagaagtcggcgatcaggatgccaaacagcgggccaataaaggcgcccagtacgtcgagggtatagtggatcagctccggcgagttaaacagattccacggcgtcaggagtatcgagcccaccgcggcaatcatcccgccggtacggaagctgattttctgcggggcgcagttggaaaaatcgaaggccggcgagacgaagttagccacgatattgatgccgatggtggcggtgatcatggtcagcaggccgatggccaccgccagatcgttacccacgcggctgacggtttcgatcgggtcggtgatcattttgccaaacagcgactgggtgccggagacaatcaccacggtaaccaccgagaatagcagaaagttaaacggcagtccccagcggttaccgcggcggatctcgcccatgcttttgccgtagcgggaaaagtcaccgaagttaagcagcggcccggagaagtaggagaccaccagtgccgtggcggtgatcatctgccaggtctgctcgccggcgctcagggatttgctggcgagggtaaaggagataccgtccagaccagtcttgtatacaatccagccggccagcgccagcatcaccacataaaccgccggaccagcgatatcgataaagcgtttgatggcgttcatgccatgccagaacaccatcgcctgcagcagccacatagtggcgaagcacagccagccgagcgttgatagcccgagaaagctgctgctggtcagcgaggcaagggagggccagaacttgagcagaaccagcatcagggcattcgccgccagataggtctgaataccgtaccaggcgaacgcgatcagcccgcggatcaccgccgggatattggcgccgaagacgccaaacgcctgccggcagataacggcgtatggcaccccggccatctggctcggcttcgccaccaggttggcgcacagctggacaatacagatgcccaccagcaggcagagcagaacctgccagctggccagcccaagcgtaaagaagctcgccgccactacgtagccgcccatgctgtgcacgtccgacatccagaatgaaaagatattgtaccagctccagttctggtcgcgggtcggcgccagatcgtcattacatagccgcggactgtagccggcggccgcctcgtgagtcttcgtctgctgcgtgtgggatgaatgtggcatgaaacctgctcctctgaatgaaaaccctttgatatggattgctgaggctattgcaggatccaggccagaatgatgaatcttgtatacaaaaaataaattttatgtatacgatctgctatcgataagtgaaaccggagtgggttaatgaataatgaacatcgtctccaggccgcgccagcgctgcaggacaaggacgaaagcatttaccaggcgctgatgacggctatcgtcgaacatcagctgccgccgggcagcaaactgccggaagaggcgctggcggaggtgttcgccgtgagccgcaccggcatcagaaaggtgctgcaacgactcgccgctgtgcatctggtcacgttgacgcccaaacgtggtgcacacgtcaccagcccgagcgtggaagagtcccaggcgatctttcgcacccgggcgctgctcgaggtcgccaatctccccgatgtgatcgcgcgctgtcagccgccgcatctggcggcgctggagaacattattcagcgtgaacagcaggcccatgcggcgcacgacggcccggcggcgatccgccactccgctgactttcatattcagctgcaggctatctccggcaacccggtgctcaccgagatggtgacccgcctcagccagcgctcctctttagtgattgccgcctggggcgccccctggcgacagggctgccgttgcgacgatcaccagcagctggtcggtttgctgcgggataaagccctgcagccgctcagcgaggcgctgatgcaccattttgatcatattgttgccagcctgtgcttcgagcgcgatggcgtcagcctgcccgatttttcccggctgttcgccggccacaaggagtcgtgatgtcttccgttcgtatacaagtgattaaccccaacaccagcctggcgatgaccgaaacgataggcgccgccgcgcgtgcggtcgctgcgccgggcaccgagatccttgcggtctgtccccgcgccggggtgccgtcaattgagggccactttgacgaagccatcgcggcggtcggcgtgctggagcagatcagggccggacgcgagcagggagtggatgggcatgtgatcgcctgcttcggcgacccggggctgctggcggcgcgggagctggcccaggggccggtgatcggtatcgcggaggcggcaatgcatatggcgacgatggtcgccacccgtttctccattgtgaccacgctgccgcgcacgctgatcatcgcccgtcatttgctgcaccagtacggatttcatcaacattgcgcggcgctgcacgccattgatttgccggtgctggcgctggaagacggtagcggcctggcgcaggagaaagtgcgtgagcgctgcattcgcgcgctgaaagaggatggcagcggggcgattgttcttggctgcggcgggatggcgaccctggcgcaggagctgacccgcgagctgcgggtgccggtgatcgatggcgtcagcgcggcggtgaagatggtggagtctctggtcgcgctgggcctggcgaccagcaagcatggggacttagcgttcccggagaaaaaagcgttaagcggacagtttcagtcgttaaatccattttaaaaggggcaggagatgggagagaaccaggaacactatcctcgcgatctgcgaggttacgcaggggagccgccgcacgcgcgctggccgggtggggcgcggatcgcggtgcagttcgtcctcaactatgaggaaggcgcggagaatcacgtcctgcatggcgatgcgggttcggaacagttcctgtccgatattatcggcgccgccagctacccggcgcgccatatgtcgatggattcactctatgagtacggcagccgggcagggttctggcgcatccatcgcgagttcagccagcgcgggctgccgttgaccgttttcggcgtggcgatggcgctggcgcggcacccggagattgtggcggcgatcaaggccgcggattacgatgtggtcagccacggctggcgctggatccactatcagcacatggatatcgccgaggagcgcgcgcatctgcaaaaagcggtgcaggtgctgaccgacctgttcggcaaaccgcccaccggctggtataccggccgcgacagccctaacacccgccagctggtggtggagcacggcggctttgactacgacagcgattattacggcgatgatttacctttctggagcgaagtggcctgcagcgacggtagccagcggccgcacctgatcgtgccttataccctcgacgccaacgacatgcgcttcgccaccgcccagggattcaacaccgcggagcagttttatacctatctgaaagacagctttgacgtgctgtacgccgagggtgaaaccgcaccgaagatgatgtccgtggggatgcactgccggctgctggggcgtccaggccgtttccgcgcgctgcagcgtttccttgattatatccagcagcacgacaaggtgtgggtctgcacccggcagcagattgccgaccactggcgcgaaacccatccgtatcgcgggtagcttgttgcccctgatcctggccctctcttcagggagagggctccgcccggtcgcgtctgttacaccggtttaccagaatgtaatttgattattgaataagcatggcgaggagtaccaggcacagcagcagcacatagatgcgcgcataccatacatcaggtaccgcagggattgcccggcggctaaacactatcccggcccagccggtcaggacgagcaggcctaaaattttcaggctgataaaccccagaaatccgctcagcggaatgctgtgccagccaatgacggcataggtcacagccccgcatagcgccacgggcaaagaaagcgggttggatgcgctaacgcactcctgcattgcatacccgtgtcgccgtagcaggggcaccgtcatgacgctgccgcccacgcccagcaatgcggcgatcgtaccgataatcacaccgccgccggtgaccactggcagggacaggcgacgccgagcgctgcccgtgaaaaaacccttgcgcaacaaacaatcgctgatggttgccagcatatagagaataaacagcacgcgaacgatcttctcgctcaatatccccgccagacaggagcctaccaccgccccaatggcaataaaccataacaacggaaacagcgtctgcgcggcaagcctgcccgcccgccagtttcgatagctgacccagccggcgttaaatatcatcaccgccgttgaggtagccactgcgacatgcatggcgttgcccgcgatcgccggctgccggagcatcagttgatagacaaagggcaccaccacaaagccgccgccgaagccgaacagcaccgtggtaatgccggtagtaaagcctgccagcgcaataataacgatctcattcaagagagtatccccgacctgaaaatgagcgagcagcttataccggtcgcgtactgcttcccatttgcgtagcgctcaattacctttgtaaatcggtcagagggaggcaggtgtgcgcaacgtaaaaattgacgagttcgatcgactcgatcgtgatgtggtggcgttaggtaatgactatgcgcagggatttatcctgcccccgcaccagcatcgtcgcgcacagctactgtatggcgcgaccggactgatgtatgtcactacgcaagacggagaatgggtggttcctccgcaacacgctgtctggatcccccctgaaaccgtgcatgccgtcagatttgcaggggtgaccacgcgtagcttgtatattgagccagattgtgtggccgctttcattaaacaccgtcgttgcgaagtgatcagcgtctcgccgctgttgcgtcagctactgcttgaggctgtggatttaccaccgttgtacgacagcccacgcgatcgcacgctgatacagttgatgttgctggaactggccgccatgccggtccgcgaatttgacattccgttgccgcagcatccggcgctgctggcgctttgtcaggcttttttgcttaacccctctatccatgatcctgcggcgcgctgggccagggcgctgtttatgagtcctagtacctttcgccgccatttcctgaagcagctgggcctgtcgttttccgcctggcgacagcgagcctgcgtggtgagcgccctggcatggttgatagcaggcaaaccggtgaacgaagtggcattatcccttggatacgacaatgcgtcctctttcgccaccatgttccgccgcgtgaccgggcagccgccgtcgttttatcacccagcctgaggcgtcggagaaggggactcccgcagcatgtgtcggaaaagaatgtcgcttttatggcgttgctatgcgtttacgcggtcataagacagataatccaggaaggcctggcttcgttttcaggtacccctacatttagtggtggctacatccaggcggtttatctattctgcctgtaaccgtgagaagaccggagtctctctttgtgaaccatcttatcgttgaaaaaatcatcatcatcattcttctcatcctgtggggattcgataccttcagaaccaggaaaagaaaacgctatgatcccgcgattgaagcggctgatgccagcgaacgttatcaatggcgctatctgagatggggatttcgaatcatacaggtggtagcgggagtgtatatcgtcgttcaactgatacaggtattactgagatagaggcatgggcagagttgcttttcgcgtcgacaaggggaagcgttcgctctgtgccagagcagacgttaacgtcgataactacgtcacttctgaagctgaacataaccattatcagctacacttgttcctgtttttcgtcgagagctgagaacttgcctgcatatcaaaggagggtttttagatgataacatttcaaataacggcttatgtgaccctgcaatgatgcaagtgatactggttcgacacgcggaaacagaatggaatgtaaaaaatattattcagggacacagtgatagcgcattgacgcttcgtggggagcgtcaaacatcagctttattggcagcgtttgcagagagtgattaccgggtagaatgtgtttacgcgtctccacttggccgggcctggcaaatgggacagcgcctggctgagcgtttttattgttcactgatagctgaaccggctctgaaagaacaggcttttggtcagtttgaaggcatgacaaccgtagcgctgctgcaaaataatccggacgccgcagaagcattattcaccctggatgcagagtattgtccgccagggggtgagtctctctcagatgcttcgcagcgaatgatacattttttatccagtctggaaaaaaaacatcatcatcgaacaatatgtattgtgtctcacgggcaggtcattcagggcgtgcttgcaacattaaaaagtggatctgtggatgattttcaccgctatgcacaacccaatgcgagttacgccgttttcgagctgattaatggaagctgtaccgttctaagctgggggatcgcgacacatttacgtcacctggattagccgttaccttgctgtcattcaaatcgatgatgattgaagtacaacgtccgcttcttgcccgcatcgaacggaggtaacgtagcggaaatatgttttcggactctaccaggatgcctttcatcgaaacgtttatgactttccttctcgcactgacgcttctggagatttctcctgggccagacatgatgctgactatcgccaccaggagcggatgttgcatgcccacaggagcgcgatggaaatgtagcagtacaacttatccctatcgtcaaaaaatggcactaactgaaagatgtcaatctgcttcctcatatatatctacattcccccctattcattaataaaggatggatgaagatgctgagaggtaaaagagctgtaattaccggtggtggcacgggatttggtcaggcgctgagcgtatggttagcgcgagaaggcgtcgaggtggatttttgcgcgaggcgcgctgatgacattcaaaaaacttgcagtatcattacggctgaaggcggaatggcgaaagggcatctctgtgatttaaccctacctgaatccctttctcagttttcttcacagttgttaactttagacaagcccatagacattttaatcctcaatgctgctcagtggctttcaggaacgttagacgatcaatcagacacagaaatcataaatactatcagttcaggcctgacaggttctattctgctgactcaggcattgctacccgggttaagacgttcagaaagtgcggatatcgtctcaattatatcttcatgtgggattcctaattttacagattcaattgcgcaccccgctttttttgccagtaaacacgggcttagcgggtttacaactaaactttcgtaccagttgtctaaagaaaatatacgtgtgactgggttgtatcccccggatttcgagctgacagggttagaggcgtttgtcgatagccagcccaaaatgggggaacgtctgatgaatgggcgttcagtctgggaaacaattcgctttgtgctgactcaaccccgtaattgccatatcaggagcatctactttgaaggcccaactcgcgaaaaactggcagtcagaagctgagtctgcgacgtttaacaggctttgttgaataaatcagatttcgggtaagtctcccccgtagcgggttgtgttttcaggcaatacgcacgctttcaggcatacctgctttcg

SEQ ID NO: 5341 - DNA, 24424 bp, Unknown
  gut microbiota DNA sequence
ctggcagcagcttgttctcttccagcagcgccagcttcagcgcatcatcgcgaagttggctgccgtaatcgcccaaccagcgattctcatcctggcgcggcgtggtaaccgccagcttcatggcctcatcgccgcgcggcgcatcccccatggttttcagcgcaatgccgagctgcagcagcggcaagccggatcgcgcctggtcgtgacggctccagatttcacgcaaggcgccgagcggcgctttttgctgacgcgccagcaccagcgcggcataggcctgagcggcaaagcggctggcctgggcgtcgtcgctgtagcgcacggtcatcaggcccggctcctgcagatagcgcagcaggcgttcgttacctttattaatggcgttgaccggtacgctatagccctgctcgctggcgcgcacgaggaagtccatggcgtaggcggtcagccagtactcttccggcccctctctatcccatagcgcaaagccgccgttttccagctgcatctgcagcaggcgtgaaataccgacatcgatggccgcgcggcgtttttcgtcgctgtccccgctaatgcccagcgcctttagctgcgccgcgctggtatacagggacgggaacaggccgctggcggtctgctcaaggcagccgtaaggataggctttcagctcgcggatatagcgggcgagattcaacggtggtttaccgctgagcagcagttggccctgcagcgtttgcggggcaaagccctggctctgcgccgccggcggctgccagctttcacctggctgcagcactgcgccgctgttgacggtctgtgccgggtacgccggacgcacgccgattttccactgtttttgcagcggggcgaaggtttcgcccggcaggctcaggccgctgatggtggcattaacctgaccatcgccgaagcccgccagcgcgctcactggtataaacagcgtgctgcgcgcccccggcgccagttgcaccggcggcagttgaccctcggtcaaggtcaccagcccgctggcggtaagatgaacctgcagggtttgcggtttatcggtcagattgctgagatccagcgccagccgtgtggtatcgccgctggcgaggaagcgcggggtgttcagttcggcgatgaccggggcggccaccaccactttatcttcgctgctgccgaagtcatccgccgtccacgcctgggccatcacccgcagctcgccgttaaaatcgccaatgggtaacgtcaccgtgccttcgccctgatcgttcaataccaccggctgcgcctgctgggcgacgatcgtcacgtggttgaccggcggtttgccgccgcgttttaactcgtcgccatcgccgccgaagcgcaggctggccacccgcccctgcccttcgatcacctggccgtagatgtcatagatatctgcgccgtaacgcttctggccaaagaaggcgttccacggatccggggtagcgtaatcggtgatattcagtaccccgctatccaccgccgagagcaggacattgacctgtttcggcgcctcgccctctttgacgctggctttcactttcaccgtcagcggctggttggggcgtattttgtccggggcctccagcgccagcgtcaggcgacggttttcatcgcccagcggcagatgcagcaggcccaccgcgcgtttcggcgtcgccgagcgcgatttatcgccggggcgaaccaccagcgtgctgaggtagagatcgtggcgattccaggctttatcgaccggaatagacagatccatgccctccgccgggacgtcaatttcctgccaccacagcggcccttcgctggattcgaccatcgcgtagcctttacccgccgccggggcggcgatgtgcagcctgatggtatcgcccggtttatagccaggtttgtcgagcttcatcgttacgcgatcaggacgcgccgcgccggcgccttcgctgttatcctgccagctgtagcccgcccagaagcgcacgctgctgaccacgtcgtccggtcctttcacctccaggcgataggatccccactccaccgggaagctcactttgccgatctggccggcctgcaggtctagcgactcctcgccctcctgcagatctttttgatcgaactgcgactgccagccttcgctgtcggaccagttccagtagtagtcgcgccgctcgcggatcagccgcacctggagaccggagatcgcttttttctcgcctttgacgtcggcatagacgatatcaaacgcggcgttactgttttcatccaccaccggctgtttgacggtggtatcggtgcggtaatcgtaaacgtccttcagcgtaaattgcgggcggatccccggcagcgcctcggcgggccagatcggctgcttaaccgtacgggtcaccgggcgaccgccggattccagcaggctggcctgcagcaccacctgcagcggcgaatggctatcctgccactggcttgaggtggtcacttcgccatggcctttttcgtccagcgtcagctggacttcatccagactacgggagaggttttcttccgcaatatcgccgaactggaagcccggcagcgcagcgacggcgtcgcgcagcgggcgcaggaacagcttgccctgcagctggttgccgctggccggcgcgccgtagagataagcgccgctaacgccaaaggtgacgtcggcatccggcgcgactggcgcggcctgcggcgtcaggttcagggccatgcgttccggcataaagtcttcaacgtggaaatcccattcgcgcggttgattgtcgccggcgctggcgcgaatgtgccacatgccggtagccgcgccgctgtcgagcggataagtaaactgatacaggccattcactggtttgctcatcaccgagcggatcacctggccgtctggctgaaccacctccagtttcaccggctgctccgccagcggcttgccgtcgctatcgcgcaacagcgcattaaggatcaccgtttcgccgggacgatagagatcgcgcgggccaaacataaagaactgtttgctaaagcctggcgcccctgcgatagagaattccgccagatccagcgccggcagcttgaggtcgagcagcgtggtctgcccctctttgcgcgccagcagcagcgcggcttctttatcggtttgcagggtgacgtggccctggctgtcgcttttcgcttccgccagggtctgccctttggcattgagcaactgcacctcaatgcccgactggacggcgccgttttccagactctgggtaaaaacgtccagccggttatggtagcgatgcgccgagacgccgatatcgctgagggtaaacagcgtcgccgcgttgctgtagctataacggcccgccgggttcatgaccgccacgtagacgccaggctgctggagcggcttgatgtcgctcagcggcagcagcagcttttcgcgagtattacgcgccgggttgagatcgaagcggccgctgtagaccagatccgccatcttcagcagttcatcagattcccagttgcttaacgagttacggtattcccactgactgacaaaggcggagagcgattccggcttaatgcggaagaaattaacgtcgacattatcgacgttcagcgccatcaccggcagcccggcgaccacgttgcccggcagcagcgagccgcggctggcaaacccaacgctcggtgcgatatcgcgggtggtcagggtcttctcaaacggtttatcgagcgtcgccttgttcagggcggtcagcgtcgggtcgactgagacaatcagctcgcgctttggctcaaggtgacgcagacgcagctctttcagattcggcgccagctcccaggcaccgtccaccttaccgcttttcttgtcgaccagatgcacgctgcgggagaaatcctggtccggctgcagcgggacggaaaacgtcagcaccagggtcgcggcgccatccagttgcacctccgaggcgtcgaggagcgtcagcgctttaccctggcttttttccgccagcgccgccagctgggcgcggtccggttttgccgtcgcgcctgggttgctatccgcggctggcgccggggccgaggcctgcggtgtaccgctgtcatcacacccggttaatgaaaatgcggtaaggagcgccagtgatagcgccgctaaacgaaatggtttcatccttctaacccctcggccgatgagcctgatgctatttgtcacatttattatgcgttatggcggcgcttctcaacagtgacgaagcgggtttctgccgattaatcagaaaagtgccgtgacgccgtccccactctggcgtccttaacttgtcagcgccagctaaaacgccgacaattcagtcatgaataataaaacggaggcacctatgtccacctcgttttttgtcgctgccgactggctggcagaacatattgatgacccggaaattcagattatcgacgcccgcatggcgcccgccgggcaggaggccctgcgggatatggccgcggaataccgcgccggccatgtgccgaacgcgctgtttttcgatatcgaggcgctatccgaccacaccagtccgctgccgcatatgatgccgcgggccgaagcgtttgccgtcgccatgcgcgaactgggcgtctgcagcgataagcatctggtggtctatgacgaaggcaatctgttttccgccccgcgcgcgtggtggatgctgcgcacctttggcgtagagaaggtgtcaattctggccggcgggctggagggctggcggcgcgacgaactgccgctggaacaagggatgccggaggtggccgaaggggaattcgacgtgcggttcgatcctcaacaaattaagcgtctgaccgacgtcctgttggtcagccatgaaggatcggcgcagattgtcgatgcccgtccggcggcccggtttaacggccaggccgacgaaccgcgcccgggcctgcgccgcgggcatatccccggcgcgctgaacgtaccgtggacggatctggtgattaacggcgaactcaaaaccgttgacgagctgaacgacatctttttacgtcagggtgtcgattttgaacggccgatcatcgccagctgcggctcgggggtgacggcggcggtggtcgtgctggcgctcaccacgcttggcgtgaacggcgtctgcctgtatgacggctcctggagcgaatggggcgcgcggagcgatctgccgattgaaccggcccctgccgctccgtaaacacggcgtgaccgcgggcctcccgttccgcggtcactaaataatttctgattttctctcccactttcttctgcttctcgctaaaccggttactctgtgctgccgcagggcttgttcctgccgagttcgctttgcctgatggggaggcagagcactggtacagaattcctcagggctgatagcgcatccagtccatcccaatctgatgtcaccacaaggagtgaaaatggcattagtctctaacccacattcggcttattcaccgcgccttccctggctgggaggtatagctggcctgctggcaggcggcgcgatcctttatttttggccgcaatggaaccggacatggctaagcctggtgcctgcgccagtctccgtgtatacccgctttctcggggtcactctcgaagacgttccgttagtcacctattgccatcaggcgctgctgggttttctgatggtgctgctcgcgcccggttacggtaagtcgacccttgccgcgtggatgatgcataacccagcgtcaagccggcgctggcccggcgaggtattccgtgcctgggtcacaaaatttggcctgctggtcatggtcttttgcaatctgttctttttgtcccgggtcccatccggaaccctggcgttatatatttttattctccagcacatcagcgttgccgcggcggtggcgtcaggggggctgctcctgcgtgacgcccggcgcctggcccgcacgttcgacgctcagctggcggacctgcgtcttctcatgatacttaccctcgggttccagacgattttgccggcgcagatcgcgctgatgagcgcccggggcgtgaatacgccgctgggctggtacattgttatcgcgcaaatggcaggggtgttactggcgtttatgctggtcggcgggctggtggcagcgctacgttctctgctgcgcgaagagaggtgccgggcctggcgcggggatatggcgctcttcaacggcattgtcacactgtgcgtgacgggatttctcctctatcacatggtgtctgcctatccgcgaatctttgccgccctgcattagcttttgccaccccgcttttgtgcctcgaactggaagcagaaagaaacagcgggggctgccgcccccgctgtcagatgatgcggttctgcttaaaatcgcgcaggaagctgccccagcgcttttcatagaacggcgtgatatgggcaatcataaagtggctgatgcccttctcgccttccaccacctggcaaatatcgatcggttcgtcgcctggcaaggtatcggtggccacgctgccggtggtctggataatggcttcaatatctccttccgcttcaatcccgatcaataagttggccggcgcgtcggcgcgctctttaatcgagcacagaaacgcccgcttgacggtcttcagcgttttgaacaacgtggtcagcgaatcgaccatctgcgccggcggttcggcgacttcagacagcagcagcgcttcgccgccttccagtaccgtctgggtgctcagtgggctgccctcttcgcctaacagatggctgatttcccgtggggtgaactctttgccgctcggcagcttcgggttgaggaataacgattcgcccagcgtcatcgccatcagcgtgcgggccggcatcatcacgaaagcctgttcatccgccaccgcctgctgcagcgcctccagcgaggtaaagaatgggatcaccgaggtaccgtcgtctttttcccaatgctgcagatccagcgcgctatcttcgacaatctgctcgccatcggctgccctgcccggcacccagacggtggcctccagcagcgcgctgaaaaatgccggacgatgggcaggctcagtcgccgctttttccagcagggtttctaattcattttttgtatctgacatagtttggctacttcacaatgaattgcccggcggccattcgtccacgcgggcatatggttttcctggccgggtaagcgcagcgccacccggcaaggccattactcagctgtcagcaggttagcaatggtacgcacgccaagcccggtggcgcccgccgaccactgctcaacggcagatttgcggtaggttgccgaacagtcgatatgcagccaaccctgatggtagttttccacgaagtgggacaggaagcccgccgcggtgctggcgccagccggataggccgcgctgccggtattgttcaggtcagcaaagttggacggcagctggttgcggtggaactcggccagcggcagacgccagaaggcttcgttttccgcctgagcgctcgccagcaggcgattcgccagcgcatcgtcaaagctgaacagcgcgtggtaatcattgcccaacgcggttttcgccgcgccggtcagggtggcggcgtcgatgatcagctttggcttctgcgccgaggcgtcaatcaggccatccgccagcaccaggcggccttccgcgtcagtgttcataacttcaacggttttgccgttgcgataatgaataatatcgcccagtttgaaggcgttaccgctgatcaggttgtcggcgcagcacaggtagagcttcacgcgtttgttcagaccgcgggtaatggcgaaagccagcgcgccggtgatagtcgccgcaccgcccatatcggatttcatcgaatccataaaggcgctttgcttgatgctgtagccgccggaatcaaaggtgatgcctttgcccaccaggcaggcgtataccggcgcctctttatcgccggtcgggttatagtccagcgccagcaggaccggcggacgctcggagccgcggcccacggtatgcagaccaagatagccctgctcgcgcagatcttcgcctttggtgatgcgatagcttatcttctcacccgccacgccacacagcaggtcgacagcgcgctgcgccagctgctccggacccagctcttccgccggcgcattgatggtgtcgcgcacccagtcgatgatcgtcaggcggttatccagctcgctgcgctgcgcgtcgtcaagggatggccattcgacctgacgctgacctttcggccctttatagccggcccaaaaggcccaggcgcgatcggtgttccagccttcgccgctcagggcgacgtgcttgatgcccatgccgtcaattttgcgcgccgcgcgctggataagcccgaggtcgtctttaccgttgagatgtagagcgatgccgtcgttattgatgctccaggtcgctttttctccccagcgtccatcggctggctgagtagaaagcgtaatcttcatagcttcggtcattatcattatccttcttagcaaacgggccaccctatggcagcccgttaaaatgttttcgcttaacgcgaaattattcggcctcgtctagccagactagcagaatcgcctcgagaattttttcattggatgcgtttggatcatcatcaaactcttccaaatcgcaaatccactgatgcatgtcggtaaagcgaacggttttcgggtcgagatccgggtaagcgtcatacaaggcttcgccgatttcgcgactgtcggtccatttcagtgccatattagtgctcgcgtgcgtggttgatggtgtaacgcgggatctcaacgaccagatcttcgtcggtgacgcgcgcctggcagctcagacggctgtcaggttccagcccccaggctttatccagcatgtcgtcttcatcttcgctactttccgccagcgagtcaaaaccttcacgcacgatgcagtggcaggtggtgcaggcacaggatttttcgcaggcgtgttcaatttcgataccgctacgcagcgcggcatcgagaatggtttcaccggtctcagcttccacaacgatgccatccggacacaggtcctggtggggcagaaatacaatttttggcattttaaacctcgtccacggattggcctttcagcgcgatacggaccgactgatccatacggcgagcggcgaattcctgggtttgtgtgtcgatatttttaatcgcttctttaatcgcgtcagcgtcgtcgcctgccgcggcggcgcgtacctgctccgcagcggcatcgatggcctgacgctccgcggcgcttaacagcgcggcgtcggcggccagcgcgcttgtcaggctctccagtacgcgcgcggcttccactttctgttcagccagcatgcgcgcctgaatatcctgttcggcgtagctcatcgaatctttaatcatggtggcgatttcgccatcggtcagaccgtaagacggtttcacctggatggaggcttccacgccggtcgatttttccatcgccgtaacgctcagcaggccatcggcatccacctggaaggtaacgcgaatatgcgccccgcccgccggcagcgccgggataccgcgcagcgcaaagcgcgccagcgaacggcaatcctggaccagctcacgctcgccctgcatcacgtgaatggacatcgccgtctggccatctttgaaggtggtaaactcctgcgcgcgggccaccggaatggtggtattacgcgggatcactttctccaccaggccgcccatggtttccaggcctaacgacagcgggataacgtcgagcagcagcagttcgctgtccggcttgttgcccaccaggatatcggcctggatcgccgcgccgatggcgacaactttgtccgggtcaatggaggtcagcggagtgcgaccaaagaactcgccaacgcgctcacgcaccagcggcacgcgggtcgaaccgccgaccatcaccacttccagcacttcttgcgcttcaacgccagcgtcttttagcgcccgacggcaggccatcagggtacgttttaccagcggggcaatcagatcgttaaactggctgcgggtgatatcgccctgccagccgccgacctcgacgtgcgctgcctcggcatcgctcaaggcgattttcgccgcgatggcggcatccagcagctcacgctgcagacggttatcgctgcggtcgctgaagcccgcttgctcgcgcaggtagtcagccagcaggtgatcgaaatcatcgccgccgagagccgagtcgccgccggtggccagcacttcaaacaccccgcggcttaaacgcagaatggagatatcaaaggtgccgccgccgagatcgtagaccgcaatgaccccttcctggccggagtcgaggccgtaggcaatagccgccgcggtcggctcattgagcaggcgcagcacgtgcaggcccgccagacgcgccgcgtctttggttccctggcgctgagcgtcatcgaagtaagcgggaacggtaatgaccacgccgtcgagttcgccggccagcgcttcggtcgcccggacggccagcgctttgaggatatcggcggagacgcgaatcgggttcagcaggccgccggcggtctggatcatcggcaggccgttttcactggcctgcagctgatacggcagatgcgggtaacggttttgaatatcggcgagagagcgccccatcatccgcttcacggagctgatggtattggcaggatcctgagcggcgttaagccgggcgtcatagccgacggtcagccccgaagcgtggtagttcaccaccgacggcagcagatagcggccttgatgatcgggcagagtctcggcctggccgctacgcacggtagccaccagagaattggtggtgcccaggtcgataccggccgccagacgacgctggtgcggcgcggcgctcaggccgggctcactaatttgtaataaggccataattgcttccgaaaattaaaaatcgagcagtttttcttcgagttcttcagcactgctgcgcagtttatcgaggaaacggagcttacgaaccgtgtccgccgccgcctcccagctctcattatgcaattggtcaaccatcagctgctgacgggtatcaaacagcgctttcacccgtttgataaaaccttccagccgcgcgtcgtctttcgcctggccgatctcatccagctcttcgcgcaattccagctgttccatcaggaacgcggtatcgcgaacggtatgctgctcgctggccagatcgaagccatgcagcgaaaggagatattctgcgcgagtcagcggatggcgcagcgtctgccaggcctggtttatagtggcggaatgctgaaccgccgcaagctgttccgccgcaggcgcgctggtaaatttatccggatggtactggcgctgcagatcctgataccggacagccagttgttcaagcgagagggtatagctggctggtaacccgaagagggtgaaatagtccatagtaacctcagggtcatgcatctaaattaaaaccccacgcgcggcgtgaccgcggtggggttgaggagtaccgattatacgttaaagctttcgccgcagccgcactcatctttgacgttagggttagtgaatttgaacccttcgttgaggccttctttgacgaagtccagctgagtgccgtcgaggaattgcagacttttgccgtcgatcacgaccttcacgcctttgtcttcaaacacggtgtcttcagccgccggctcgtcaacaaactccagtacataggccatacccgagcagccggaggttcttacgcccaggcgcaggccaaaccctttaccgcggttcgccaggaaggcattgactcgcgctgctgcactgtcgctaagagtaatcgacataacaaaacctcaactaattattttgcttcacgtttgcttttgtaatccgcaatcgcggctttaatcgcgtcttccgccaggatcgagcagtggattttcaccggcggcagttccagttcatcggcgatatcggtgttcttgatcgcctgcgcttcgtccagcgatttgcccttcacccactcggtaaccagggagctggaagcgatagcggaaccgcagccgtaggtcttgaagcgcgcgtcttcaatgataccttcattgttgactttaatctgcagcttcatcacgtcgccgcaggccggcgcgccgaccatgccgctgccgacgttctcgtcgctgttgtcaaaagagccgacgttgcgcggattctcgtaatgatcgataactttttcgctgtaagccatgatgaattctccttattggtgccgaattagtgatgtgaccattcaatgctgttcagatccacgccctgtttgaacatttcccacagcggagaaagctcgcgcagacggccaatggatttgcgaatcagatcgatggcatagtcaatctcttcttcggtagtgaaacgacctaaagagaaacgaatagaactgtgcgccagttcatcagtcatgcctaacgcgcgcagcacgtaggatggctcaaggctcgccgaagtacaggctgaaccggaggaaaccgccaggtctttcagcgccataatcagcgactcgccttcaacatagttgaagctgacgttaagaatgttcggcgcgccctgctcgaggtcgccgttgaggtacacttcttccatatccttcacgccgttccacagacggttgcgcagcgtgcgcagacgcgccatctcgctttccatctcttctttggcgatacggtaagcttcacccatgccgacgatctggtgaacaggcagagtaccggaacgcataccgcgctcgtggccgccgccgtggatttgcgcttcgatacgaatacgcggcttacgacgcacgtacagcgcgccgatgcctttcggaccgtagattttgtgaccggagaaggacatcaggtcaactttcagctggctcagatcgataggcagcttgcccacgctctgggtggcgtctacgtggtaaatgataccgcgggcgcgacacatctcgccgatggtagcgatatcctgcaccacgccgatttcgttattcacatgcatgatggaaaccaggatggtgtcgtcacgcatcgctgcttccagctctttcagatcgataatcccgttgctctgcggcgccaggtaggtcacttcgaagccttcgcgctccagctgacggcaggtatccagaaccgctttatgctcggttttgctggtgatgatgtgcttgccttttttctgataaaagttggctgcacccttgatcgccaggttgtcggattcagtcgcaccagaggtaaagacgatttcgcgcgggtcggcgccgaccagctcggcaatctgattgcgggcgatatcaaccgcctcttcagcctgccagccaaaacggtgggaacgggaggccgggttaccaaaggtcccgtccatggtcaggaactgcatcattttctcggcaacacgcgggtccaccggcgtggttgcggagtaatcgaggtaaatcggtaatttcattgctcttaaactccgtacatcactcaatgcaaggaatcaggcaaccggcttgatgtacgaccgagtacacggaatgtcggagcatcccggcctgattctgaaagctctttataatcgttgtcccgccgtttcgcgccgccttgccctgtcagccgcagcccgaaacgggacgggtcactcaggcgcgcagtttaacgtcaatcgcgtcctgggtgcgcgcattgcgctgggtttcgtgctgatgctgacgaccggaaacatcgaggatctcctggttattcaccagttccccgagggtgatattgttcaggaagccggtcaggcgctcgctcaggtcgcgccacagcgcgtgagtcaggcatttatcgccgccctgacagccgcccttgccctggcaacgggtggcgtcaacggattcgtccacggcgctaatgacttcgccgacggcgatactgccggcatctttacctaacagataaccaccacctgggccacgaacgctggaaaccaggccatttttacgcaggcgagagaacagctgttccagataggaaagcgaaattccctgacgctctgaaatatctgccaacggcaccgggcccgtttcagagttgagcgcaacgtcaagcatcgcggtcacggcataacgccctttagatgtcagtctcatgtcttacttaacctcaaactcgcccctggccgggctttttattaatatgggtattgcatagcagggccaagtctgacattcccgagtaatttggtcaactatttacttgactgttttagtcaggtatttggctttccgtgccgttttacttccgcatagcctgataccttcatcccgccaggcgagcccgattcgttgcccggataagcgaaacgccatccggcgttaacgcagttacttacctttattctgctgctcaatagacgccagcatgccgcgcaggatgttcaactcctggctttccggacgcgcgcgggtgaacagacgacgcagcttgttcatcacctgccccggatgattcgggcggataaagcccgtcgccagcagcgtctgctcaagatggtcgtagaatcgctccagatcgtccaccagcgggtacggcgcctcttcatgctcaaccgccggctgcgcttgctcctgcgccgccagccaggccatccgcacttcataggcgataacctgcaccgccatcgccaggttcagcgagctgtactccgggttggcggcgatcgccacgtgatagtggcacttctgcagttcatcgttggtcagaccaacgcgctcgcggccaaagaccagcgccaccggcgcatgctgaccttcggcgacgcttttcagaccgcattcgcgcgggtcgagcatcggccacggcagcgtgcgggagcgcgcgctggtgccaaccaccaggctacagcctgccagcgcttcatcaagggtatcgacaatctgcgcgttgccgatcacgtcgctggcgcccgcggccagggctatcgcctgcgaatcgggtttgaccagcggattgaccagccacaggttagttaagcccatggttttcatcgcgcgggctacggagcccatgttgccggtatgggaagtttctaccagtacgattcgaatattttgcagcattatggttcttcggctaaagattattcgtgcatgctaccataaaacggagacataagcagatttggctgctattatatgcgccgttttttcccgttctttaacatccagtgagagagaccgatgcatccgatgctgaacatcgccgtgcgcgccgcgcgcaaggcgggtaatttaattgccaaacactacgaaacgccagacaccgtagaaaccagccagaaaggcagcaatgattttgtgaccaacgtcgataaagccgccgaagcgattattatcgaaaccattcgcaaatcttacccgcagcacaccattatcaccgaagaaagcggtgaacacgctggcgaagagcaggatgttcaatgggttatcgatccactggatggcaccaccaacttcgttaaacgtctgccgcacttctctgtttccatcgccgtacgcatcaaaggtcgtactgaagtcgcggtggtctacgatccgatgcgtaacgaactgtttaccgcgacccgcggccagggcgcgcagctgaacggctaccgtctgcgcggcagcaacgctcgcgacctcgacggcaccattatcgcgaccggcttcccgttcaaagcgaagcagcacgccaccacctacatgaatattctcggcaacatgtttaccgaatgtgccgacttccgtcgcaccggctctgccgcgctggatctggcctatgtggccgccggccgcgttgacggttactttgagatcgccctgaaaccatgggatttcgccgcaggcgaactgatcgcccgtgaagctggcgcgattgtctgcgacttcaccggcggtcataactatatgctgacgggcaacatcgttgccggtaacccgcgcgtggtgaaagcgatgctggcgaacatgcgcgagcagctgagcgacgcgctgaagcgttaatctcttactgatgtcaaaaaggaagccgcggcttcctttttttatgtcattttatcatgttgaggatctggcgaatcaccgcattaccgccaatacagagcaccgtcaggccgctaaataaggccagcggtccgcgccaacgcagacagccctgcgtccccagccagcgccggaaacacagcgctatccctaccaccgtcagcctggctaacagcacgccgaccatcgccggaaccagcagcagccatccccacagcggcagctcatactgctgcgcactgagtaaaatccataccagctgaaacggcagataaaaactcagggcaaagatcagcggaatgcgaatattgcctgccggtgcggcaacgccctgaaagtcgcgccagccgtcgcgcagcagtattccagccagcaccagcgtggccagatagcatacgtcgttaaagatgcccacgatctgcattagcctgtcgctgcttagcttacccataaacgcgaaacgccagaaaatgatcaccagaaaaccgaactgcaacacccagctgcgcaggatccagtcgaccatctcccgcggcgagggctggttatgcacagcccaggcaacaatgggcagtttactgtgaccgggatgacaaaaggccagcacgaagcccgacagcgttagggtggcgtaggccaccagcggaatatccgcgacactcgccaccccgaatcgcataacatacggcatggcgtggtagacacgcaccagatctgacggccaccagctggccagggctggaaaccagaatacgatcgccaggcccgccagcagcccggcggcgccggcgcagccataatagaaccgcccgctctgcgcgggagaaacgatatttgcggccatagcgactccttgtcatccgccgaaaagcggaaaactagagcatcgcttcgccagcggcaagcgctggcgcccactttaggatttgcgcccggcgtctgtctaaaacggacggatcccaccgccggcagggacggcgctgagccacatcacccctgccgccgccagcaatatgacgccgccggccagcgccagcgtcgcccaactaacctgcttccataacgctggcgcctgatggcgactgaggcggatcgccagttggcggaacccatgcaccaacagcgccagcgccgtgatagtcaacgaggttcccgccgccatcgccagcgccgccgccatcccccagccaaaaacgccgattaccttgctgaacagcagaaccatgatcgcccccgagcagggacgcatacccatcgacaggacgatcgcggcgcgagcccgccagtcgtcgccagcctgcagctgctccggggccgggagatgctgatgcccgcagccgcagtgttcgttatgaacatgatgcggagtaaaagcggtaaacgttggccggcgcagcagcagacgcagcttttttaacgcccgccagcacagcagcagccctaacgcgcccaccagcaaatagctccccttctccagccagaaactgctgaggtgcagctggcacgccggcagctgcagcagcgccagcaccacgaccaccagcgcgatggccaccagcccctgcagtaaagaagcggccagcgtcaggccaatgcttgatttcagcttcgcgggatgggtggcaagccaggtcgtaatgacaattttaccgtgtccgggccctaaggcatggagcaccccgtaaacgaagctaaaccccagcagcgacagccctgccgccgccgggttctccgccaccgcctgcagcaggcggctgagttccaggtttagcgaacgctgccagactgcgctctgcatcagcacctgcggccacgcccgccacagccagatgccgccgatgatgctcacagccagcaacagcgccagcggccacagcgctttccagcgcgaaaatcgcgcgcgcggagtaaaaattactgacatgtcagggtcaccttctgggcaaaatagctgcccagcgccatatcctccggcggcgcatccgctttatccagcgactgggcgtatgagagcattttgtcgttcggttttggcgtcatcaccgttgccttacaggcggcccgcagccctgcgggcagggaaaaatcgctatccttgtcataaaacatatcgacgtagtaggtcgggtcgaaggtggaaaaggtaaacgtctgcccggcaatgggttgcggcgtcgccagcggcagagtaaaggtgagtaccgcctgcagtccgtcacgttcgaggccgtaaccgtcgggacgattgtcaaatttaacccgctgaccgttatgccacagctcgctgaaatagtgctgaccgagcacgttggccatcacctccgccgccagctttttccagacttcgctgcccggtttggcgtttccggcatcatagagcagatccgatgaggtaatttcatccatcgtccagcgcattttaaaggcgctcagcagaccgtccttgaccaccggctcgctttgcaggctgatgaagctatgcggatgcgcagcggccgaccatgataaaaccatgaaaaacgccgcgcttgtgcattgtttcactctgttcatctgttcctcacgtgaaaaattctgtgaacttcgccagcaatcctgagtaaaagcggacgctcttccctgcccacgccgcggtcattgtctatccttagcggaaaccctaactggaacttaccagatgatgaccgtcattgaaccaccatctgcgctttccagtccacagcgccgtagccaggtgctcctgatgttttatctgcccggacagtcggtgacgactgaacggcttggcaggatcaacctcgttgatgagaccacggcccggcaggatattgaggagaccggacgcgaaattcagcgttaccaccgtttgaccctccagtcacaggtggacggcagctatcggattgaaggcgccgcgctcgaccaacgtttatgtctgctgcatgcgctgcggcgggggctgcgcctctgcccacagttcgttaatcatcattttaccccggcgctgaaaacgcagcttaaacaggaaggcattgcccgcaccttatacgatgataccaatctgcaggcgctggtgaaccgctgcgcgcgggcgctcaatcgccagtttgactgccgcgacgtgcagtttctgcgcttgtacctgcagtactgtctgctcgaacatcaccggggatactctccggacttcaatgaggaacagcaacgctgggctcaaaccgccgccgagttcaccctggcgcaggagattgtccgccactggcagcgtcgggtcggcgctccgccccatgtcggagaaccttttttcctctcgctgctgtttatgttgctcaaaacccccgacccggtccgcgacggtcacccgcacgatcgccgcctgcggctggctatctccggcctgatccaccgcttccagatcctcgctggcagagcgttcagtgatgagcaggggctcagcgatcaactctatattcatttgtcgcaggcgttgatccgcagcgtgtttgctatcggcatcgacagcacgctcacagaggaagtgacccggctctaccctcgcttactgcgtaccacccaggcggcattgagcgaattcgaggaggcctggcacatccgttttaatgaggaagagaccggtttaatcgcggtgatctttggcgcctggctgatgcagaaaagcgacctgcacgagaaacaggtgctgttgctaaccgatgacaacccagctattgaagaggccctggaacaacagctgcgcgaactaacgctgctgccgctgaatatcaaataccagagcgtagagcgctttcagaaggaaggtgcgcccaaaggggtgacgcttatcgtcaccccctatgcgacggcgctgccgctgttttcgccgccgctgatccacgcggagaactacttcactgaacgccagcagcagcatatctgcgccatgctcgaggactaggccgccaccgcttttggccgtatagccatcgccgggagcgtcagcagggccatcacccagaatacgccctggtgcaggtgctgatagaggaaaccggcgaagacggtcatgatggcaatactgccgcccatcgccaccgcggagtagacggcctgcagacggatcacttcgctaccctgacgggcggcgatatagcgcatcgccgccagatgacacaccgtgaaggtgccacagtgaaggatctgcgcaaggatgagtcccggcagcgccgtggtccagcccatcagtccccagcgaatcagcccgcagacggcggagagcaagagcaggtcgcgggcgctgaagcggcggaacacctttttactcaacgcgaagatcaccacttccgccaccacgcctaacgaccatagataaccgaccgccgaggcggaatagccggcctgctgccagtagatggcactaaagccatagtaggcggcatgcgctccctgcagcagacaaacgcaggcgagaaagcgccagctttggcgcaccagcgtcagccaggccgccattccggccccctgctgctggcgcgactccccctggggcatcaccgacggcttaagcagcatgccgagcagcatcgaggcgccccccaggcttagcatcagcaggatcgcccggtaatcgaacaggctcaccagcttgccggtcagcgccgaaccaatcacaaaggcaatagatccccacagccgcacccggccatagtccatggtgatctgcttttgccaggtattggccagagcatccgtcagcggcaccagcggcgaaaagaacaggttgaagccgatgatgatcgccagcagccatgctacgtggctgccggcccagaaggccagcgcgaagagcaaggttaacagcgccagcacgcgcagcgcggcgatcagccgggagggatcgctcacccgcggggcaatcagcagactgccgagaaaacgggccaccagaccggcgccaagcaaaatgccgatggtttccggagtcagcccgtttccggccagccagacgctccagaagggcagaaaaataccgtagctaaaaaagtaggtgaaataactgagcgccagccagcgcgtggagtgcaagaccatgatttcctcccgaatggtggcgatagtctggcgataaaccccggcgggcgcaagatgctcttgtctgctgatagctcgttatttatgccccctcgatgatgattttcagcgaaaaattcagcttctctcccgcgcctaaaactcgcagccccggctgcccatccatgttgtgggcgtttaccggatggctttgcggctcgaggcaaaggaatgattcaccttgcattctgaacagcatcaaccacggagtttgcgatagaattgtgatattcatcacgtcattacttaccttcgcccgcccgccccagccggaataacccacgttcagccaacgatcttcaccgaactgagccacgctgaaattggcatagtcgggcaagtttccttgccagttgagaggtaaatgattctccccttccggccagtaaccgctgacctggaactgaaccttgctgcgttcatcgaaagggaaaaagggatgaaagccgcagccgtaaagcgcagggacctccccatagtgggtaagcgttagctccgctatcagctggttacgcagcaactggtagcggagctgcgccagataatcgaaaccgcaggcatgctgccgacgcagctgtaatacacaatactcagcgccgcactcaataatatcccagcgctgtaaccagccgtcaccgtgaagaaagaaatactcgtcggcatggtggcgaggcaggacaatctcctgcccatgaaaaataaaacggttgccggcgacgcgattggccaatggcagcatcggaaacatgccgccggcgggattttcatatagcaccggcgcttgatattgccgcgagaataaactttgcactttgccgcccagagaagagacgcacatccgcagatgcgcgttctccagaatccactcttccgccattagcgcatctgctcctgcttcgccgcattaacgcccgtatgacgctgcgccagctgctcttccagcgcttcgagggtgatacctttcgtttccgggacgttgcgcaggatatagaggtagccggcagcgcaaatgacaccatacagcaggaagcttcctgccgcgcccagaccggcattaagcagcgggaaagtataggttaacaggaaacaggcgatccacagcgccagggtacctaaagacatcgcgagtccacgtacgcggttgggaaaaatctccgccagcagcacccaggtcaccggcgccagggtcaacgcataaatagcaatcgccgccagcaccagcaacagtaccggccaccccataatgcccatggcgtaagcgccggcgatcagcacatagatcagcgtcaatcccgaagcgccaagcagcattaatttacggcgaccgattttatccaccagcggcagcgccgcaatggtaaagaccagattaacgacgcccgtcgcgacgatcgatttcagcgtgctgttaatatcgaaccccgccgaggcaaaaatctcctgcgcgtagttaaagatgacgttaatcccacaccactgctggaatatggcgagcaccatgccaatgatcacaatcggtttcacctggggagccaacagcgcgccataggagactttattgttatccttttccagggtatgcgcgatttcacgcaggatcctgtcggcatagtcggcagaaccaatgcgttccagcgcagcccgggcgcgctccggtttaccggccttcatgagccagcgcggcgactcggggacaaaaaacatcaggaccagaaacgccagcgccggcaccagttccgcaccgaacatccagcgccagcccatctgcccattccagctgtccacaatcatctgctgcgtcgcccccggctccaccggttcagcaatcatcagattgattaactgagcggccagtacgccaatcacgatggtgagctgattgaccgcgacaaaacgccctcttttctctgccggactgacttcggcaatgtaaagcgggctgagagcggaagccagaccaatccctacgccgcccacaatgcggtaaaccacaaacatatcgaaatgactggcgaccgccgtcccccaggccgacgcgctgaacagcacggcggaaagaattaatggcagcttgcgccccagtttgtctgcgcaccatcccgaaattaatgcgccgaaaatacagcccaacagcgctgagctcatcgcccagccggactgcgccgggtccgtaattgaaaaccaggcttcataaaatggcttagcgccgccaatcaccacccagtcatagccaaacagtaaaccaccgcaggcggcgaccagacaaatcgtccagacgtagcccattttcagatgtgtctgcgcgttgttcataatgattcctctataagggaaacgcagggaacagtagggttcaggcgggccgagcccgcccattgaggttcaggaaaaaatgccgctttgcagggcatggcgaatcagatgcgccttatcatgagccggatttatttgcagaagctgctgcatcctctgctggcaggcggatacgttgcccagccccagatggcccaacgcttcaataaacaagcagtgctgctgatgtctctgctgcgctgatacatcgagaaccaccaggtccggaagagagacggcaaaaaaatcgacttgcggaacgtcatcccgatgctgcgcggcccagtcgataaaatggcggaagtgctgctcggcctgcgctgggttaccgctcttacgcagcgcaatgccctgccagaaaagataatcggcgggttgatcgttgtagtaccgcccggcgtccagcgttgagcccccttgccgggcaagctggtaatattccgccgcctgctgcgcatccccagcctgttctgcgcagtagcccagcaaataccagatatcgttatccgtttgcccaagcagtcgcccctcccccagattgtcgggatagcgtaatgcggctttcagacagtccgtggcctgtttaaacgccccacgctcgatgaactgtaatgcccgatggagctgattgagcaaatactggccggtgattttcccttctcctccttcccagggatggaatacgcgcgtatccagaatcgcggcggcatcggcataatgaccggacgcgttccacaggcttagcag

SEQ ID NO: 5342 - DNA, 6935 bp, Unknown
  gut microbiota DNA sequence
ctgttcctcaatggcgccacgccccgggaggcgctgcgatgggcaaacgccagcggctcgctggcgattagccaacgcggccccatggaaggcacctcgacgcaggcggagatcagcgcttttcttgccgcccagcatccctaaccaacaagcccggatagatccgggctaaaagtggttaaatccttacgctctcgatcaggttaccggcgccgggttaaataccgccagctggttgtgcaggccccattgatcggagaaggtttttttgcgtccgctggcgacgtcgagaataaattcgaacagcttccgcccgacatcctcaatcgtctcttcgccagtggcgatggtcccggcgttaatgtccattaagtcataccagcggttggccagctcggtacgggtcgccatttttatcaccggtaccgccatcagtccgtacggcgtaccgcgaccggtggtgaatacctgcaccgtgatgccagaggctacctgctgggtgccgcagacaaaatcgctggcgggggttgcggcgtaaatgaggccgcgtttggtcggacgctgccccggagagagcacctcaacgatggcgcttttccctgatttggcaatcgaccccagcgctttttccaccacgttggccagaccgcctttcttgttgccgggggaggggttggcgctgcggtcggttttgcccatatcaagatagttatcgtaccaggccatctcttccagcagacgtttaccgacctcttcgttaatcgcccgcggggtcaacagatgaatggcgtcgcgtacttcggtcacttccgagaacatcaccgtcgcgccgcagcgcaccagcaggtcggacgcgtaacctaccgccgggttggcggtcacgcctgaaaaggcgtcgctgccgccgcactgcatcccgaccaccagctcagaggccgggcaggtttcccgctggcgctggttcagtttcgccaggtggcgctcggcgacctgcagaatgtcatcgaccatcgatttaaaaccaacatgcttttcatcctgcaggctgacgatgctggcgctgtccaccgggatacttttgacgtcttccgtgccctgcagcaggcgttccggctgcagcttctcacagccgaggccaatgaccatcacctcgccgccgaagtttgggttgagggcgatattatgaatggtgcgaatcggcactaccgccgccggcgcattaatcgccacgccgcagccgtagagatgattcaggcccaccacgccatcgacgttgggatagtttggcagcaggtcgcgttcaatgattttcaccacgtaatcgaccacgccagcgacgcagtgcacgctggtggtaatacccagcagattcttggtacccacgctgccgtcagcattgcggtagccttcgaaggtgtaaccttccagcggcggtagcggttcaggcactttagtggccaacggcagggtattcagcggcggggcggtgggcagctccaccagcgactcgtcaatccagcttccctgcgggatatcgcgtacggcatagccaatgacttcgccgtagcggatgatttcaccatgggcggggatatccaccagggcaactttgtgaccctgcgggatatgctcgacgagcgtcaggccgtccgggaaacgcgttccggcggttaagccgcgatcgttgacaataatcgccacattatctgtcgggtcaactttaatataaaacgcggtcggcgattgttgtcgaattgcaatgtcagccattgtccagtcatctccaaacaggtgctaataataaaataaaacactaattcatttgctacgtatcagtatgatggaataaaggatgtcagctgagttgattttaaaatgtgatcgtcatcactcctttttatgacgctaacctctgcagggcaggcaatcgtaagaagtgtggattagcgcccatgacttatggcataagcacaattatggatttaaataataactttatattgtgggtatgcatagtgtctggcgggggcgtgctgattatactgagtcatgtttttgaggtgatcgatatgcgaatagacaatttcaatatcgtcttttaaataaatcagaaaccacttaaaacaattataaaaggtgttctgtgcccgaggaatgtctaaatgattttggattctacattagatgaaaaaaaaggaataccgacccgctatttaattctgttgatgatatttgtggtgacggcagtgaactatggcgaccgcgcgaccttgtctatcgccggtactgaagtcgcgaaagagctggggctcagcgcggtgtcgatgggatacattttttccgccttcggctgggcttatctgctgatgcagatccctggcggctggctgctggataaatttggctcgaaaaaggtttattcatacagtctgtttttctggtcactgtttaccttcctgcaaggctttattgatgtgttcccgctcgcctgggccggggtctccatgttctttatgcgttttatgctgggcttttccgaagcgccctcgtttcccgccaacgcccgcattgtggcggcctggtttccggccaaagagcggggtacggcttcagctatctttaatgccgctcagtacttctcgctggctctgttctcgccgctgctcggctggctgaccttcgcgctgggctgggaacatgtctttaccgtgatggggataatagggtttgtgctcaccatcatctgggtgaagtttgtgcataaccccaccgatcatccgcgaatgtccgccgcggagctgaaatatatctcagaaggcggcgcagtggtcgatatggaccataaaaaagaggccaccccggcggccgggccgaagatggactatatccgccagttgctgactaaccgaatgatgttaggcgtatttttcggtcagtatttcctgaataccattacatggttcttcctgacgtggtttccgatctacctcgtgcaggacaagggaatgtcgattctgaaagtggggtttgtggcttcgattccggcgctgtttggctttgctggcggcgtactgggcgggctgttttcggattatctgattggccgcggctgcacgctgacttttgcgcgtaagctgcccattgtgctgggaatgctgctggcgtcgtccatcatcctgtgtaactacacggccagcacgccgctggtcattacgcttatggcgctggcgttctttggcaaaggctttggcgcgctgggctggccggttatctcggatgtcgcgccgaaggagattgttggcctgtgcggcggggtattcaacgtctttggcaatgtggcctcgatcgccacgccgctggttattggctatatcgtgagcgaactgcactcatttaatggcgcactgatttttgttggcggctccgcgctgatgatgatggtctgctacctgtttgtggttggcgatatcaaacgtatggaattgcagaagtaagcaacgattaacgcaaggtaaaaatcatggataacgcaatttttccgaacaaatttaaggccgcgctggcggcgcatcaggtgcagattggctgctggtgcgctttggctaacccgattagcaccgaggtgctgggtctggcggggttcgactggctggtgctggacgcggaacacgcgccaaacgacgtcaccacgctcattccgcagctgatggccctgaaaggtagctccagcgcgcaggtagtccgtgtgccgaccaatgaacccatcatcatcaagcgcatgctggacatcggcttctataacttcctggtgccgtttgtcgagacggctgaacaggcggcgcaggcggtggcttcgacccgttatccgccggaagggatccgcggggtctccgtttcccaccgcggcaatatgtttggcaccgtgccggactacttcgcccagtccaacaagaacatttccattctggtgcagattgagagccagaccggagtggacaacgtcgaggcgattgccgccaccgagggcgtggacggtgtgtttgtcggcccgagcgacctggccgccgccttaggccatttgggcaatgcctcccatcctgaggtgcagcgcgctatccaacatatcttcgccagcgcgaagaagcacggtaagccaagcggcattctggcgccagtggaagccgatgcgcgccgctatctggaatggggcgcgaccttcgtcgccgttggcagcgatctgggcgtcttccgttctgcaacccagaaacttgccgacgcgtttaaaaaataatcaccaggatgaagagagagaacattatgacaatcaaagtaggttttatcggtcttggcattatgggcaaaccgatgagcaaaaatttgctgaaagcgggttactcgctggtggtgtctgaccgtaacccggaagcgattgccgacgtgatcgccgctggcgctgagaccgcgacgacgccgaaagcgattgccgaacagtgcgaggtgatcatcaccatgctgccgaactctccgcatgttaaagaggtggcgctgggtgaaaacggcattattgaaggggcgaaaccgggcaccgtggtgatcgatatgagctccattgcgccgctggcgagtcgggaaatcagcgaagcgctgaaaaccaaaggtattgatatgctggatgcgccggtgagcggcggcgaaccgaaagccatcgacggcacgctgtcggtcatggtcggcggcgataaagcgatcttcgataaatactacgatctgatgaaagcgatggccggctccgtagtgcataccggcgatattggcgcgggcaacgtcaccaaactggctaaccaggtaattgtcgcgctgaacatcgcggcgatgtctgaagcgctgaccctggcgactaaagccggcgtcaatccggatctggtttatcaggctattcgcggcggtctggcgggcagtaccgtgctggatgcgaaagccccgatggtcatggaccgtaacttcaaaccgggtttccgtatcgacctgcatattaaagatctggccaatgcgttggatacctcacacggcgtgggcgcccaactgccgctgacggcggcggtgatggagatgatgcaggcgctgcgcgcggacggtctcggcactgcagaccatagcgcgctggcgtgctattacgaaaaactggcgaaagtggaagtcactcgctaacaagaagggcgccctgcgcgccctgttatgcttgccttgcgcggcactgtcaggctacaaaattatgaaaatcgtcattgccccagactcttacaaagaaagcctttctgccagcgaggtagctcaggcgatagaaaaaggatttcgggaaattttccctgatgcacagtatgtttccctgcccgtcgccgacggcggcgaagggacggtggaagccatgattgccgccacccagggaaaggaacatttcgcatgggtaacgggtccgctgggtgagagagtgaaggcctgctggggcatgtccggcgacggcgtcaccgcgtttattgagatggcggcagccagcggtctggggctcgttccgcccgacaaacgtaacccgctcatcaccacttcacggggtaccggggagctaatattacaggcgctgaagcatggtgcggaacggatcattatcggcatcggcggtagtgcgaccaacgacggtggggcgggtatgatgcaggcgctaggcgcccgcctctgtgacgccgagggacaagagatcggccatggcgggggcagtttgagccgtctgagccggatcgatctttccgccatcgatccgcgcttacgtgacaggatgatccacgtggcctgcgatgttaccaatccgctggtgggcgagcgtggggcgtcgcggatctttggcccacagaaaggggcgaccgaggcgatgatcgtcgagctggatcgtaatctggcgcattatgccgacgtcattaaggcgtcgctgcaggtggacgtgaactcgatccctggcgcgggagcggccggcggcatgggcgcggcgctgatggcctttctcaatgcggagctgcgcagcgggattgagatcgttaccgaggcgctgaagctggaagagcagatccatgactgctcactggtggtcaccggggaagggcggctcgatagccagtctgttcacggtaaggtgccggtgggggtggctcgggtggcgaagaaataccgtaagccggtgatcggtattgctggcagcctgactcacgatgtcggcgtggttcaccagcacggtatcgatgccgtattcagcgtgttaacttccgtttcgacgctggaagaggcatttcgcggggcgtttgataatatttaccgcgcgtcgcgtaatattgctgccaccctgcaggttgggatgaccactgagggatgacaacgggcggtaaaccctctatactgcgcgccgaagctgaccagacagtcgccgcttcgtcgtcgtcctccttcggggggagacgggcggaggggaggaaagtccgggctccatagggcaaggtgccaggtaacgcctggggggtgtcacagcccacgaccagtgcaacagagagcaaaccgccgatggcccgcgcaagcgggatcaggtaagggtgaaagggtgcggtaagagcgcaccgcgcggctggtaacagtccgcggcacggtaaactccacccggagcaaggccaaataggggttcataaggtacggcccgtactgaacccgggtaggctgcttgagccagtgagcgattgctggcctagatgaatgactgtccacgacagaacccggcttatcggtcagtttcaccttttacgcaaaagccccgctccggcggggtttttgctattcgaatagcggagaaaggatgaatgactgtccacgacgctataccaaaagaacgcggcttatcg

SEQ ID NO: 5343 - DNA, 466824 bp, Unknown
  gut microbiota DNA sequence
ctgacattaaccgactttgcgcgcttgctgacactggtgtaatccgggcagcgcaacggaacatttatcagtgtaaaaatggaatcaataaaaccctgtgcagcccgcagggtcagcctgaacacgcgtttaatgaccagaacggtggtgacggcgagatcagaatagcgctgaggtcttccccgtgatgaaggcgttgccgactcataccaggcctgaatggcttcatcatccagccagaaagttatggagccacggttgatgagggctttattgtaggtgggccagttggtgattttgaacttttgctttgccacggaacggtctgcgttgtcgggaagatacgtgctctgatccttcaactcagcaaaagttcgatttattcaacaaagcccgtttaacagtgtagccaacgtccgctgatcgctcatatcagaccttcaactcagatagcttgtccgctctgtgccaggagcggacattaaaatcaaaaccgatggcaagcttaccgagcataacattatgcttgcgctgctgtgtaacgtgcttccagcttatccaaaaagccaaaaagtacttgattcatttcactgtaatcgtgcgcccggagcgcttcaggcgtgtcaacgaaacgatattctgctgcacggctcaggtctttctcagaatgagcgatcagccgttctacaacgtccaatgtgagctccatgtggcactggaaaccaaagacgcggtctgaataggcaacgatctgccgcggacagccttcgctgtaagcaataattttggcctctggcgtcaaacctggcatatcgttatgccagtgacccacttcaagtgttttcccaaagtgagagaacatctcatccttcctgccgtcttcgctcaatgtgatcgggaatttaccaatctctttttccgggctatgagagaacggcgcgcccagcgcttcaccaatgagctgtgaacccaggcagataccgatcaccgccttaccggttttaaccgcggaagcaatcagcgcctgttccgctttagcattaaagtgcgggcacgcttcaagcgtggtgtccggatcttgcggaccgcccataacgataagaaaatcgatgcctacggcgtcagcaggtagccgatcgcctgcatagacgcgtgagtaagttacatcatgaccctggtttattgcccaggtttcatatgcgcccggggcttcaaaactttcatgtacgataaagtgtacacgcatgaggttaagctcctgtaatatctttgatgatcaggatgataagtcacgcacccattgcctaaggctctactccgggtggttccagtttcgatatgataatggcaggggctaaatctcaaatgccaggtagtatagataaagcgccaagacatgatgaagccacaggctggtccagtactgcgataagctatcaacgcggcgaggcagatcctccccatcatcatgttgaggggcagctactcttcgccaccagaggggttatgctggtgcaaacagagagcgaccgttgggtgatccctcctcagcgggcattatggctaccgcctctgcatatccatagttatcatctgctttcacaaaccgatctcagggcgatctatttcagcagtagccttatcgcagaatgtacgagctttacgaagagtcagcaggtacatgtgatcacggctacgcccttagtcaaagagcttatcgctgggctgttcagtgaggactacgccagaccgagtcaacggaagatagcgttgttgcttctggaaattctcagcgaggctccacctttaacgatggcgcttcccatgccgaatgatgagcgattattcagcgcggccagatcgctactggtcaatcagcgctgggaagcatcgctgagcgagctggcttttatgtcggccatgtcggaacggaccttttcccgattgtttatgaaggatacaggctttagttttagaacatggaagcagagagccagaatttgcgcttcgttggatcttctcgcgaacggcgttccaatcaaacaggtcgcttaccagcttggtttctcatgcccggcggcctttaccgctgcttttcgctgcattttgggggcaacgccacgcgattatgtgccttaaaccgggaaaccctcaaagcggtctttgagactgtcatgggcatattaccagacgcagaaaccctgcgagggcaggggtatcccgcctttgctgttgagaaaggtagtttaatttgcacccgacatcactctcattgattaaagcacggagtggagattactgcggtccatagttctgacaaaccgtgaaagagaaggcctgcatgaagaaaaaaggtgtcgcgatgtgtgatgaaattaccttatgacagaccttgcggtgatttacggcaccgggtggattccggacgctgtgagcccctcattgctacgaagcctgattctgctgtacctcaggccatatgatagcctgcgcaacaatcacatcctgcccattaatgcgtccaggggagtactcccgggccctgcatgtccctgtgtgccaaaagcggaagtaggctgaagataaattagcattgctgttagtcgtgggttttgcagatgggtagaaattgataacttaggatgcaagttcgtcccgctctttctgcagttttcatcgaggggatattctccggaataattgtgcccatatacaaagatagttccgaatcggaatgagttaataatcggtacagcaggcgttgcgctcgggctgacaatgatcgaccacgaaaagcaggaagtattattttgtcagtaatacgatatcctctcagaaaagcgaggtttcctttctggcatattagcaacccggcgcgaacatcgttttcatagataatatatacttctctctcagaaatatggtcacacaactcttcgtcatcaactgctaccaaattgcttgcagacagttcgcgaactgtctgccatgtatgcttataggcatcacccagggcctgacaacaccagtcaaaatcttcgtatgtcgccacttgcaaagtaagagatttatcattgaattcagggggttcagaaaaagaagtggcatatatatactggtcaggaataccctgcgggaaggactggcctggcacaagaatgcggacatactgagctctgagttgtgaccattccttactaatgagttctaatgcagtatgatttaggtcagaatccatacctacaatatcaataaaaggtttgttaatatttccgccctgataacgggggccagtaagaaattgctttccatcaattttgagttttcgttgtaaaaaatattcctgacataatccagtttctctccagggaaatcgcgccgagaaacttctgtctgtacacctcgattcctgctctgacaaccattgttttaaccatgaacgtagagtaacttcaggaacaggtagcctggcatattgagatagcatgtaagatagcataaaaaatattttgcccttggatgtaaaaatgtttttttaaacaaatcagaatagttctactcccattttattaccaattatagctggcacgtcagctccttgctcaatgcggacctttaactcgatagcttgtccgctccgcgccagaagcgaatagtgttatgagtggcaagtgataaatcgtcagcccgttgaccttgtctcacagcacctcaaccacttcaaattcttctgcgatcaactccatatcttcagaaaaatgaccttcagagctgaaaaatctccgatgctctttcttccagtattcaaggcttaaatcgccttcaccttctttgcgggcgaacgcttcagtgacatcacaaaaacgaaccagctgcatcgaaatcagtctgatcacgcaaactggaacattctgaccatcaagaataatgttataactcccgattctcggggcggattcttcctgctggtaagaggcaaaagatccgcaagaggccgttttgatcccttttttgatcaggtcagcaagctcgttagccagttccggactgtcacccatttgccaggcatctgcgccgggatatttcttttttatttcctcaacctcaaccatgaaaattccttcgttatcgtcaatgaaaagaaaagctatcccttttttaacatgagcggtcccaacataataggcgatatcattctttagatagtgtggtccgttcttcgctcaaaactgaccttgatcgataacttcggctggctggacaatgcgtcgattccattctcgatgagccgaatcggcgccattgtctccctgggtatcgcgctgtacttgatttactccagcagcagggcaaaagccgcaacggtggaaatcccccgtcggccagtaccgcaggggagctgacgattattgccagcgtttcagcagcaggctggcgttaacgccgccaaagccaaaaccgttcgacagcgcgtaacgcatcttctgtgggcgggcctgcagcgccaccagattgagacctgccgcctcttcatcggggtgatgcaggttcagcgtcggcggcaccacctggtcacgcagcgcctgaatggtgaagatggcctcgatcccgccggccgcgcctaacagatggccggtggcggatttcgtcgaggtaatggcgaccggatggacgccaaacagcgttttaatcgccgccagttcacctttatcaccgacctgcgtcgaggtggcgtgggcattgatatgatcaatctcttcgacggtcaccccggcctggcgaatagcaatctccatggcccgacgtgcgccgttcccgtcttccgggcctgcggtcaggtgataagcatctgcgctggtgccgtagcccaccagctcggccagcggcgtggccccgcgcgccagcgcgtgctccagagattcgatcacgataagcccggcgccttctcccatcacaaaaccatcgcggtcacggtcaaaggggcgggaagcgctttccgggtggtcgctgtaggcgctggacagcgcccttgccgcggcaaacccggccaggctaacgcgatgaattgccgcttccgcgccgccgcagagggcaatatccgcctcgccgctgcggatcatccgcgctgcatcgccgatggcctgggcacccgctgcgcaggcggtgaccggcgcgccgatgggcccccggaagccgtgggcgatagacacatgcccggcggccaggttggccagaaaagaggggatagtgaacggcgagagacgacgcggcccgcgttcatcggtggtatgtaccgcattggcgatctcgctgaacccgccgatcccggtggcgatcaccgtggcagtgcgttcctgttcggccgcagatgctggcgaccaaccggcctgggccagcgcttcgcgcgcggcgaccagcgcaaactcaataaagcgatccatctttttgcgctctttcgcggggatggtcgccagcgggtcgaagccgtgcagcggatcgctgtcaatggacggcacctggccggccactttgcagggaatatccgcgaccagctgctcgctgagtcgggtgatccctgactttcctgccagcagcgactgccagacgtgctgtacgccgcagcccagcgggctgacaatccccatcccggtgacgacaatgcgtttaacggaaacgcccatagttaactctcctgtagaatcagtgtgccggcggctttttcatcaagggagccagcagcgcggcaagtaaaaaacccatcatgatgaggtagaaagcatcggaaaaggcctgggttcgcgcctcccgtagcgccagcgcggcatccggtgagatccccgcgtggcgaagtttgccgcgctgcgctgaacaaaatcctggcgttattcagatggccgccagaacgaggacgcttttcttactggtcggattcattgctggcatctctgtaaggttcaggctggaatttttgtccgctatcgccttcgcgtttgcgcagcagatattcatgacgatatttcatcagcggcgaggcggcggggcccggcaccatggcgtatttacccgggataatctcttccccagtcgctttatccaccatgactggctccacgtggcgctgggttgccatttccaccagctgcatctgacgcccttcgggggcgaagtggcgattaccccattccgccagcgccagcagcaccatgcggaaatcgcggccgcgcggcgtgaggtggtattcgtagcgcggcggggtgctgctgtagcacaccttctccagcagtccgtcatcgaccagttccttcaggcggcgcgacagaatattgggcgcgacgttgctgcttttctggaactcgtcaaagcgggtaaagcccgcgaaggcatcgcgcaggatcatgatgctccagctgtcgccgatgcggcccaggctgcgggcgatggggcagggagcgtggcaaagcggttcatttttcatgggctgtccagtaaccaggtggcttttgccagcaaattgacatagtaactatcaaaatgcaagttactcttcatggtacccagagaagaagctgctgccgtttcgctacgccgtttcacctttgaatgccgaaaactggacagtcgccgccgccttatatctgcttgaccgtaataagagataaatatcgctgatggcagatgaaacattttaataatgataaaaatcgatgtgctgggtaatgacctttattgggggatacgatataaggtatggcgacactcaaattaacattctcataacttataaaggttaaataaatgaagcaggtgggtattgttggttggcgagggatggtgggctcagtattgttgcaacgcatgatcgaagaaaatgatttcgacgatattacagcgcatttttttagtacctccagtgcgggtgccccgggcccggttattaatggtagaagcgacaggctgaaagatgcgaattcccttagcgcactcgccgaaatggatatcatcatcacctgtcagggcggggattataccaaagccatctatccggcgttaattaaccatggctggcaaggttactggattgacgccgcttcggcgctgcggatggatgaaagagcctgcattattctcgacccggtcaaccgcgataatatcgatcgcgcggtaaaagcgggattgaaactgtttgtcggcggcaactgctccatcacgctgagcctgatggggctggccgggctgatcaaggctgacctgattgaatggatgagcgtgatgacctaccagtctgcctccggagcgggtgccaaacaggtgcgggaattaatcgcacaaagcgcttatatcagtcagcatttatccgctgatgaactgacatcatcaggttccgtgctgccattggtaaataaagtgagtgagctgattaacagcgcgggcatgccggtggagaattttggcgtaccgctgatgggcagcatcattccctggatcgacagcgatttaggcgatggaaatagccgcgaagaatggaagggcgaggcggaaactaataaaattcttggccttgcgccgggtaccatcccggtcaatggtttatgcattcgggtcggggtgatccgctgtcacagcgcggcgattacgctgaaacttaaacgtgaggtcagcgaagcagaatttgctgagttagtcacccattcccatccgtgggtaaactatgtccgcaataataagcaagagagtgtcagtaaattgaccccggctgctattagtggttcgctgcaggtaggtattggccgctacaagaaaatgtcgctaaataatgacccagtctactcggtgttaacggttggcgatcagctattgtggggcgctgcggagcccctgcgccgcatgttaaatatcctgctgggcaaaatatagttacggtcatccggggaaagccctcgcacgcaggcggttaagacaaatatttaacgaagcgtttgcgaacctccttgtagccgttattttcataaaattgatgcgctctgattcttttttcactgcttgaaagctcgatctgagcgcattgtttatcacgggcgaggcgctctgcggcctggagaagctgctgacctatccctgatccacgtgacgattcctcgatgaccagcgcggaaattaatgcccataaacggttctcatgtaccggtaaaataaaattgataacgattacgccacacacggcgttttctgtttccgccaccagcgtactcatcatgctctgcggggcagtgatgcgttgcgctaagatcgccgtctccgtctgatagcccagctgcagaaatagcgtttgcagcgaggggatatcttctgcttcagccgctctgatgaacaccatgatcttcgactccaaataacatgttaccggaccggaagcgggccggtggataccttattctccggtccgctcccgtatacgtcactcagtccatcagactgacctgggcggcgacaatccgccagccgtaggggaagcgtacccaggtctgctgctggcggcccaggcgcgcgctgccttcgcgggtaaactcggtgctgcacaccgccatgtccgcgccaaaggtggtgatggtggtatggcgtaggtcgcgggccagaccggcggcggggcgggcggcgcgaaaggcgcggatcgcctcgatgccatacagattttcgccggctcccagccgtacggtgcgcgggtcgtgccagaatagcgcatccagcgcctcgatgttattgctgaccagcgcctcttcatactgataaaacgccgccgtcacctcggcgaggatcgccgggcggtctacattatccagattgatcatgctgcactctccgccactcgggcatcggtaatgcccatcgcttccagcgcccgcgcggcgcgaagacaggcttgttcgttaaacggcgcggcaatcagctgtagaccaatcggcttaccgctggcggtacgcaggggcacggtcaccaccggcagaccgaggaaggagatcggctgcgtcagcattcccatgctggcgcgcaccggcagcggctggccgttaatcaccatctcctccgcgcctattggcgtggcgctgcatggggtggccggggcgatcagcacgtcggcctggctgaacagggatttcattgcctggcgagcatgacggcgaaaacgctgagcctgcagataccacgcggaggggatcatcgcgccggccagcagccgctcgcgggagtgaggttcaaagcgctcgggcgagtggcgaagatccgtcaggtactgattgccgccttcgctggcgctgatgataaaggccgctgagcgggccagcgcggcatccgcgaactgcagctcgctgtcggcgcccagcgcgtgggcgacccgatccacggccgcccgggcgtcgtcatcgcaccaggtggtgaaatagccgcccagccgcgcgcagcgcagcccctccagtccgcgttccagcagattgccggtgcgctcgctggctttatcagcctgaaagtcatcggccgggtcgcgcccctgcagggcgtcatacaccgcggcgaggtcggccacccggcgggcaaaaggaccaatatgatccagactggcgacaaacggatggctgccagagcgcgacaggcgaccgaaagtgggtttcaggccaaagatcccgcacagcgacgcggggacgcgaatcgagccgttggtgtcgctgccgaggctgaaatggaccagtccggccgccaccgccgcggccgaaccgccggaagatccgccggcgatccgcgacagatcgtgcgggttgcgtgtcgcgccatagtggctgttttcggtggtaaagccataggcgtaggcgtccatattgagcatcccgctgagcagggcgccggcgctgtgcagctggcgcaccgcccagctgtcgctggtcgctggcggccggtcgctcagcagttcggcgccggcgagggtggtatgcccggcgacatcaaacagatttttcactgcgtaaggaatccctgccagcggcggcaaggggcgcttttcccggcgcagggcgtcgatgctgtcggcctccgccagcatgcgctgggcggtgacctcggtccaggcgttgatctgcggattcacgcgggcgatatcgtccagcgtctggcgggcgatctcccgggcgctcagttcgccatcgtgcagcgcacgctggagatcggcaatggtgaagtgttgaagagtcatgctttatacacccccgcaatctcctcgcgcggcccgaggggatagtccatcagcggctgcgccatggcggcgatgcgggcaaactggcgctccagctcctcacggcgcggcgcatccagctccatatccaacaggtgagtcatctgcgtcagatactcgctccagtctggctgtgtggtcatggtctgctccttagtacccggcggcggcgccgttgctgcgtggatcggtcgccccttcaagcagaccgttgggatggcggacaatggccccggcgtggcccatcgcttcgctgaaatcggccagcacttctacgtcgtgccccagctcgcgcaggcgagcgatacaggcgggggcaaagcgtccctccagcttcagtgagtcggaggactggccccaggtgcggcccagcagccagcgcggacgggagatgctctcctgcaacggcaccccctgcaggatatagcgggtaaacagcgccgcctgcgtttgcggctgaccgtcgccgcccatcgagccatagaccatcacccggccatcgttcaggcgcgcggcggcagggttgagggtgtggaatggctgtttgccaggggccagcgccaggagatgctgcgggtcgaggctgaaggccgccccgcggttttgccagacgatcccggtgtccgggagtaccacgccgctgccgaactcgtgatagatactctgaataaacgacactgccagtccgctgttatccacgacgcccatccagacggtatcgcccgggcctttgccgccgccccagggggaagcgctggcgtcgtcgatgctgtcggccagcggctgcagggcttccggggtgagcaactgctgtacatccacatccagatggcgcggatcggtgatatgcgcatcgcgcagggcaaacgcccgcttggtggcttcgacgatacggtgcaccgtttgcgcgtcgtcggcatcggccatgttcagacggtcggtgatgccaaggatcgccagcgataccagcccctgcgtgggtggggcaagattccacagcgtgccctgctggtgctggagcgtcagcggcgccggacgccgggcgcggtgggtctgcaggtcgctgagggtgacaggcatccccagcgcggccataccctgcgcgagacgctcggccagcggcccgcgataaaagctgtcgagaccgtcgctggccagcatgcgcagggtaccggcgagggcgggctggcgaaagcggctgccgggccgcggggcctcgcccgcgaccagccaggtttcgctgaagcccggctgatggcgcagctcttccagtttgctggcggtggcgtgggcctgcgaggcagtgaccggaatgccgtcttcggcatagccgatcgcatcggccagcaggcgggccaccggcagcgcgcggccggttaagtcgcgtgaaatacgcagcgcctcgtcccagccgctgacggtgccggcgacggtcagcgcggcctgcggtccccggtggggaatatgccgctgtccggcgtaggcctcgagggtcgccagcgatccggcggccccgctggcgtcaatggcgatggggtctccctcaggcggcacgatcagccagaagccatcgccgccgaggccattcatatggggatagacgacggcgatggccgccgcggcagccaccatcgcttcaatggcgctgccgccctcgcgcaggatcgccagcgcgctctgactggcgaggtggtggggggccaccgccatgccgtgggtcgaaacgttgctactgtgcataaattatcctttctgaacgaatcacccgcagaacactgcaaaagctgttccatctctgaacgtttcgtttcattgataaaaacgatgaccagaattttcccactggcacgctatgtgtaaggcatagcagatacagtatgatgaggaatggatgatgaaacgaaagttacaggggcgctatgcaacaactcgatgaacgactgaaagggcaatacgcctcgctgtcgccgcaggagcagcgggtggcggatttcatctttgaccactttgacgacctgataagctacaacagcgccgagctggcgcagctgagcggcgtgtcgaaagccaccgtcagccggctgtttaagcgcctcggttacgacaaatataaggatatgcgcgatgaactgcgcactctgcgtcagagcgggatgccgctcaccgaccagcgcgacgcggtgcagggtaacacgctgctggcgcgccattataagcaggagatggcaaacctcacccagtgggtcaacgccctcgacgcccgccagttcgctgaggcgctgacggcgatggtggccgcccgccgcattgtggtgattggcatgcgcaacgcctatccggcggcgctgcatctgcgccagcagctgctgcaggcccgcggccaggtgctggtgctgccccagccgggtcagagtctcagcgaagagctggtcgatctgaccgccgatgatctggtggtaatgatggcgtttcgccgccggccgcgaatagtacgcccgctgctgcagcagctgcagcgcgacggggtgccggtcctgttaatgtgcgagccgcaggcccacagcctgtttccgctctcccgctggcagctctgcgcgccgctggacagcgtctccgcctacgatagctatgcctcggtcaacagcctgattaatctgctggccaatgcctttctccatgaaacgctcgacagcggtcgtccgcgcatccacgagatcgccacgctttaccagcagctggacgagctggaacaacgctgatggggcgccagcgtggtgctgtgcattattatggtgcaataaaaaccacgtcatggcgccgccgctctctgaacacttttccgttaacgcttgtcctttctcactttttgttttaattcctcgccaaccctcgcctcgtccgtatctggcacattagttgcaaaaacagattcaaagaatcttttgtttcatgctaacgtaacgggtaaacatcatgaagaaactgttgatcgcgctggccggggccgcttgtctcctatcgtctgtttctgccgcgcaggctgaccagctccaggatattgaaaaacgcggcgtcatccgcattgccgtaccccaggactttccaccgttcggctcggtgggtaccgacctgcagccgcaggggtatgacatcgatatggcgcgctatctggcgaaatcgatgaagctcaagctgcagctggtcccggtgaccagcgccaaccgcgtgccgtatctgcagaccgataaggtggacctggtgatctccagcctcggcaagaacgccgagcgcgagaaggtgatcgacttcagccgcgcctacgccccgttcttcctaggggtgtttggcccgaaaggggcggagctgaaggacgcggccgcgctgagcggcaaaagcatcggcgtgacccgcggggcggtggaagatatggtactgaccagcgtggcgccgcaggcggcgcagattaagcgctacgaggataataacactacgctgtcggcttacctgtccggtcaggtgcagtatgtcgccaccggcaatctggtggtggcggccatctcccggcagaacgccgacaaagcgccggtgccgagctttatgctgaaggactcgccgtgctttatcggtctgaaaaagaacgaaccggcgctgaaggcgaaagtggataccctcattgagcagggcattaaggacggcaccctcaacggtctgtctgagaagtggctgaaagcgccactgcctgccagcctcggcgcgtaaggtctggggatgacggagcaacttcatttctctgagctctggccgcactggccggagctgctggccggcctgtgggtgacggtgcagttgacggtgctggcgacgatcggcggactggcgatcggcatccttggggcggcgatccgcagcggtcgcccgggaatgctcagccgggtatggggcggatatgtggaaatcatccgtaatacgccgtttgtggtgcagctcttttttatcgtctttggtttaccgaacctcggactgaagatgaccgccggtgaagcggcgctgctggcgatgatggtcaacctcggcgcatatagcaccgagatcgtccgcgccggtattcaggtgacgccgaagggccagtgggaagccggtcgcgtgctcgggcttagccggacgcaaaccttcgttcgcgtcgtattgcccccggcgctgcagcggatttacccggcgctggtcagccagtgcatcatcgtgatgctcggctcgtcagtggtgtcgcaggtctcctatgaggagctgaccttcgccgccaacctgatccagtcgcggacatttttgagctttgaggtctatctggtgaccaccgggatctacttagcgttatcgatagcgatgcgccagctgctgatggcggcggggcgtaaatggctgggggtacaggcctgatgaccacttttaccgactgggacattatccgcaacctgctactggccggtcgctggacggtgctgctgtcgctggtcgcgttcaccggcggggcgctggtgaccttaccgttactgctgctgcgtctcaccggcggacgccaggtgaaacggctgatccgcgggtatattgagctgttccagggcacgccgctgctgatgcagctgtttctggcattctttggcgtggcgctgttcggcgttgacgtttcggcgtggaccgccgcctcggtcgccctgacgctctacaccagcgcctttctgctggatatctggttcggcagcattcgcgcgctgccgaaaggccaatgggaagcctcgcgctgtctcgggctgagcttcggccagaccctgtaccgggtggtggcgccgcaggctctgcgcattgctatcgcgccgaccgtcgggttcgccgtacaggtgatcaaaggcacggcgctggcatcgattatcggctttgtggagctgaccaaggcagggacgatgctgaccaacgtcacttatcagccatttaaagtgtttgcccttgtggcgctgggctatttcattctgtgctatccgctgtcccgctacagccgctatctggagaacaaattcaatgcctctcatcaccattaatcagatgcagaagtactacggcgacaaccatgtgctgaagggcgtcgatctggatatcgacatgggggaagtgatctcgatcatcggccgcagcggctcgggtaaaagcaccctgctgcgctgtatcaatggtctggagggctaccaggagggaagcatcaagctcgggggcatgaccatcaccaaccgcgattcccaggcccgggagatcagccgctccatcggcatggtgttccagaactttaatctctttccgcacatgacggcgctggagaacgtcatgctggccccgcggcgggtgctgaagaagtcccaggcagaatgccgggagctggcgcagcggatgctggagaaggtcgggctcggcgaccgtctggattactatccggccaatctctccggcggccaacagcagcgcgtggccattgcccgggcgctggccatgtcgccgaaagttttactctgtgacgaaatcacctcggcgctcgacccggaactggtgggtgaagtgctgaaggtgctggagcaactggcggcggaaggtatgacgctgatcctcgtcacccatgaaatgaattttgcccgcgaagtgggcgaccgcgtggtgtttatgcatcagggacgcgtctgggagcagggcgacagcaaaacgctgttcgccagcccgcagaccagcgaactgaaacagtttatctcctcggtgcgcggtcttaactaacgtaaggaatggcagatggatatcactcagttttcgcaaattaacccgccgcagcgcctgctgatggggccggggccgatcaatgccgacccgcgcgtgctgcgcgccatgtcgagccagctggttggccagtacgatccggcgatgacccactacatgaatgaagtcatggcgctctaccgcggcgtgtttcgcaccgaaaatcgctggacgatgttggtcgacggcacctcgcgcgccgggatcgaagcgattctggtgtcggcgatccgtcccggtgacaaggtgctggtgccggtgttcggccggtttggtcatctgctgtgcgagatcgcgcgtcgctgtcgggcagaagtgcacaccatcgaggtgccgtggggcgaggtctttaaaccggatcaggttgaggatgcgatcaagcgcgtgcggccgcgcctgctgctcaccgtgcagggcgatacctccaccaccatgctgcagccgctggcggagctgggagagatttgccgtcgtcacgatgtgctgttctataccgacgccaccgcgtcgctcggcggtaacccgctggaaaccgacgcctggcagctggacgcggtgtccgccgggatgcagaagtgcctgggcggtccttccggcacctcgcccatcaccctaagcccgcggatggaagaggtcatccgccgccgccgctgcattgagcaggggatccgcaccgatgcccatcacgacggtgtcgacgagatgatctactccaactatttcgatctcggcatggtaatggattactgggggccggagcgccttaaccaccataccgaagcgacctcggcgctgttcgccgcccgggagtgcgcgcgcctgatcctccaggagggactcgacaacggcatcgcccgccacaaactgcacggcgatgcgctgctgaagggcatccaggcgatggggctcgagacctttggcgacctgcggcacaaaatgaataacgtgctgggggtggtgatccccaacggggtcaacggcgatcaggtacgcaaactgatgctggaagatttcggcattgaaattggcacctcgtttggtccgctgcacggtaaagtctggcgcattggcaccatgggctataacgcgcgtaaagactgcgtgatgcagacgctcagcgcgctggaagcggtcctgaactacctcaggttcaccaccactcagggcgcggcgatgcaggcggcctgggatcactaccgcaccgaggccaccctatgagtgacaccgtccgccagcaggcggagagagaggcggccgccagccgggtgatggcgcgtgccgatcggctggccgccttcagcgaaaccgccgatgccctgacccgggtctatctgtcgcccgagcatctgcaggccaaccagctggtggggcagtggatgcaggctgccggcatgatggtgtggcaggacagcgtcggcaacatctgcggacgttatgaaggacaacaggagggggcgccggcggtgctgctgggctctcatcttgacaccgtgcgcaacgccggacgctacgacggcatgctcggcgtgctggcggcgattgaggtggtccagcgtctgcaccagcaggggcgacggctggcgaaggcaatcgagatcgtcggctttggcgatgaagagggcacccgctttggcatcaccctgctcggcagtcgcggcgtcaccggcacctggcctgaaagctggctgtcacagtgcgataccgacggggtgagcgtcgcccaggcgctggtgaatgccggactcgatccggcgcggatcgcccacgcggcccgtcacccgcgggatatcgccgcctatctggaactgcatatcgagcaggggccgtgcctggagcaggcggggctggcgctcggcgtggtggaggcgattaacggcgccagacggctgaactgccgttttaccggcgaagctggccatgccggcacggtgccgatgcttcatcgcaaggacgccctcgccgcggcggcggaatggatggtgcaggtggaaaacctgacccgccagcgcggcggtaacctggtggcgacggtcggcaccctgcgctgtgcgccgggcgcggtaaacgtgataccgggcgaggtgcagttgacgctggatattcgcggcccgcaggatgcgccgctgacggcgctgctggaggaactgctggggcaggcgcaggccattgccgggcgccgccagctgagtttcgccgccgaggagtattatcgcatcgccgccaccgcctgcgacagtcacctgcaggcggtgctgagcgaggcggtggtggcggtgcaggggcgttccctgacgctgccgagcggcgcagggcatgatgctatcgccatcgccgagcgctggccatcggcgatgctgtttgtgcgttgcctggggggcgtcagccatcacccggcggagtcggtcaccgccgccgacgtcgggctggctatcgacgctttctcccgggcggtagagaaggtggccgacgcctgatcgcgccggtcaccgtgccccggctggcggctttacaccgccagctggttgaccacctcggcgacggaggtgatggcatggatgttgccgatccccgcgcccaccgagatatatccctcatcggtattcccctccagcatgcccagccgcatcccgcgcagcccgcccatcgcctgggccagctcggtcctggaggcgccggcccggtccatggccaccagtgtgtcgctcagtttgccgggcagcgcgcggtagtagtccggcagagtacggaacaggcgcagatccagaccgttggcggccacaattttcgctttcaccgagtcgggaacccggctttcgatggtgctgataaataccgaaccggcgaagacgccctccgcccccagggcatgaacggcgcgcgcgccccgggcgtcggtgatccctccggcggccatcaccggaacccgctgtaccgcgtcaacgatcagcgggacgatggtgaaggtcccgagggcggtccccggcagcgtgccgccttcgtcaaagccggtggcgacaataatatccgctccggcctgctccgcgcggcggctgttctccggcgtcgggttgatgtcacgatagataatggtgatcccggcggctttcagttcgtcgaacagcgccggttttaacgaaccgtcgccgtagccggtgtagaccaccaccttaaccccttcctctttgatcaccgggaggatcgccggcgtccagatgtcattttccgccgtcgggatcaggttgacgccaaagggtttctccgtcagctgtttggttttgcggatctcttcgcgcattttctcggcggtggcctccggggtggagacggcggttgccgccgtcagtccggcgttcgggcccagcacgccaagcccaccggcgttgccgacggccgccaccagacgagcatcggttagccaggagaggggcccctggaccaccggtttttcaatacccagaatgcgggcgactcggttaggttgcatgctatttttccttgtatgttaataagttataaatttgttcgccccagcgatgcggcaatgagggcagtgtaggcgtctttattgttttaaaaaatgagcaaaaactttcatcactattattaaattagtaataatgtgaactgatgaagaggtgggaggcgggccatcatgcaaatgaatctgtttgaaaatattaaaatttttattgaaatcgtcgatgccggcagctttgcccaggcggcggaaaatttgcagatccaccgaccggcggtgaccaaagcactgcagcagctggagcaggagagcggggtccggctgctgcagcgcaccacccggcgtctgtatcttacgccggagggggaagagttttatcgtcgcagcaaaccgttgctctcccaggccgacgatctgctggagtcgttcgcgccggaccggccgatccgcggtcagctgcgcgttgatatgccgatcgcctttgcccggctgctggtgatcccgcatctgccggatttttatcaggcccatccggaggtggagattgtcctcagcagctccgacgtacgccgggatatgctgcgcgatggtctggattgcctgctgcgggtgggggatcttgaggatggcgactatgtggcgcgttcgctgggggaggtggcgttaaccacctgcgccagtccgggctatctggcgcgctatggggcgcccgcgacgctggaggacctgcagtcgcatctggcggtgaactgggtgaacagcagcagccggcagattatgccctggcgattccagaccccggagggcatcaggcagatcgccattcccggtaaactggtgctggacaactctgaagtctttactgctgccgggctggcggggctggggatgctgcaggggatgcgtttctttttgcaaccttatatcgacagcgggcaactggtggaagttttgccggactttccggcgccgcgtcgaccgttgtcgctgctctatccgcaccggcatctctcgcataaggttcgggtctttgccgactggctgcaggggctggtagcgaccctggactgacaatcggcgctgtcgccttgactctatcggctgagcgtttatatataaaatgtgaatgctattaatgcaatgaatcacaaagctggataacgacttaacctgtaagggaatgctgatgaaactctggaataaaacactactcgcttccgccctgtgcctgaccctgtttggctgcgacgatgcgtcgaaagttgataacaaactggataaggctaaagataatgcggagcagatgaaggatgccgcggcggataaagcgcaggcaattaaacaggatgcggataagcaaatcgatacgctgaaaagccaggctgacgccgaggccgatcgcctgaaggatcaggccagcgccatcaaggccgaggcggacaagaaggcggacgccatcgcccagcaggcgaaagcccaggccgatgcggtgaagcagaacgcaaagcaggaaagtgaccgcatagtcaaagaggcgggtcagatcaaagacaacgccatcggtgacgccaatcagctctcggctgaagcggcgagcaaaaccaaagccatccaggacagtatcgcgaaggataaacagaacgccgcaccgcctgccgcacagcagtaactcgcggtgtttgcctgacccgccgcccggaaatatagggagcggagcctgatagattgcccggcggcgctgcgcttgcgcgggcctacgcagggggcgggttggctgcgcaatgaccgggtatcacccttttgtaggccgggcaaggcgtcgccgccgcccggcacatggaccgcaataacatcctgctcaggggtatcttacgataccccttttttatgcccgccgtgggttcaacggtttggcagcagggtgcctttcaggccgtgcggctccgagcgcaaatactgcgacggcacacggacctgggcgccaaggctggccgctgcatgccacggccagtgcggatcgtagagtaccgcgcgggcgagggcgatcaggtcggcatcgccattctccagcgccgcttccgcctgctgcgggtcggtgatcagccccacgccaatcactgggatggctacctgctggcgaatatcgcgggcgaaaggcaactggtatcccggcccaacagtgatcgcctgctgcggcgacaaaccgccgctggagacgtgaatatagtcactgcccagcgtttccagctgctgactaaacttaatggactgctcgcagtcccagccgccttcgacccagtcggtagccgacagcctgacgcccaccgccatggtgttgcccactgcctcgcggatcgccttaaagacttccagcggatagcgcattcggttctccagcgaaccgccgtactcgtcgcggcgctggttgctgagcggcgagagaaactggtgcagcagatagccgtgggcggcgtgcagttcaatcagctcaaagcccagccgctgagcgcgcagcgcgctggcgacgaaggccgctttgatgcgcgccatatcggcatggctcagttcagcgggggcgcgatcgccatcgtgaaacgccacggcggaaggggcgacggtctgccagccaccatcgttgagcgccagctgatggcctccctgccacggggcggcgcaggatgccttgcgtccggcatgacccagctggatccccagacggatcggcgaccaggcccgaatatcttcgactacgccgcgcagggcgttttcggtttcatcatcccacagccccagatcccccggggagatacgccccgcaggctctaccgccgtggcttccagaattaacaggccggcgccggagaaagccagttggccaagatggatccggtgccaggaggtcgccttaccctcgtcggcggagtactgacacatcggggcgataacgatacggttatcaagggtgagttgaccaattcgcgtcgcgctaaaaagatgactcatgaatacctcgtaaatgttaaacgtggtcgtgcaggggacggacagttgctgtttatagcacgcctgttcaccccccagtattcggatattgcgcttaagcgctccgctattcgatataccagagacggcgccgtcggccggcggcctgctgcgacacggcgcgggccatagcgctgccaatctcggcgctggccgtcagcccctgcacaaaggggcgatcgtgcatcagccagggaagggcgccgaaggcgacccgaccgcgcactgtctccggcgcctgcagcgtgtagtcatcaccaacgtccggaatgtcgtcgccgcaggccagcagctgctggcgcagtgaagggaagggcagatcccgggttttcagcgctttttgtccgcgggcatcgataaagacatcgaattcgcagcgctgaagatgatgaacaatcagcgtccggtcaggctcccgctgcagctcataatcttcgcccagcgtcaggatccgcagaatgccagcccgatgcagggccagcagccgacgtatggactccggcggaatggcggcgtagttatcgataaatacccgggcgaggccctggcggaagcgacggctgtccgcgtcgttgaactgctgcaccacggtttcaatcgcctcatgcaggcgcagaatggcatagcgccagggcaccgtgtggtgttcgcgcttattgcgctccacctcctgcagattgcgctgcgcccactgaaaggggtcatgggtgaggcggtcggcaaaccaggcgtcggcgatactgtcaggcgtcagctgacgaagcccgatcgcctcgctccagtcgggggcagcatattccagctctttaacgatcagctcaaaaatccgatctaacagagcgtcgctaccctccgcaatggccgcttcgagggcggcgggagtggcaatctccagcggctcccacgggatcgggcagtaaaaatcggcctccggcagcacgccgtggcgtgacatcagggtgatctccagcgcttcgctgcctggatgaagggaaaaatgggtcgttttgtcgtcctcggtatggaaaacgccgtggcgggccactaccgccacggcggcatcaatcgcgcttaatgaagtcccaaggatccccacccgacagggggcaatgcgggcctccatcaggccggtccacgggctggggaagtactgtctgctggcgcgctcttcttcaggccacagatggccggtggcaatcgccaccaggtcgacaattaccgggtctgctgcactatcggtgtggatggcgatcccggtgggctgaaccgcaatatccgtgacttcacaggattcacaaacgctaatcacaaagccgacgtcccgggcccgctcaacgaggtacagaaaacggtcgcgatagtattcgccgaggatcacccgcggcagaaactggcgctcatgcagggcgtgccgttcaagcccgcgcgctgacagccagtcatcgctttgctgctgcagccattgcaggtaggtcaggtcgatgggggggatctcaatgctggcaatattggccagcatttgcgccgcggtattatcgtcactgtagggcatacccaccccggcctgcgcctctttttcaaacagagtgatggccagcggctcaccgcgcttcaccagttcataaaaggtgtaaatccccgtcggccccacgccgacgatggcaattctcttcatgattctctcccttcctgtgggcagatgcggcattgatgacgcttcgcttaagcgaacctggttttaattctggtcgaaaattaccgaaccggtgaggggaacacgcaatttgaaacaaattagcatgctaataaacttgccgattgtcgtaaaaggggtgtaattaacaaaagagcaactttctatacaaacaatttacacaagcggtgaccccagctcgctctgctggacgccgcgcacactcccggcaatgccgtcgggatagggatgacaagatgcacggctggacctcacgacagcgtaatgcggcgatagccagttttttaagctggacgctcgatgctttcgactttttcctgttagtttttttactgagcgatatcgcccactcgtttcatgtcgaccttgaggaggtcaccctggcgattctgctgactctggccgtgcggcccgtcggcgcgctaattttcggcagggcggcggagaagtttggtcgcaaaccaatcctgatgctcaacattgtgttcttctcggcttttgagctgctctccgccgccgcgccgtcgttgatgctgtttttcctgctgcgggtgctgtacggcgtggcgatgggcgggatttggggcgtggcctcttcgctggcgatggagacgatccccgaccgctcgcgcggcctgatgtccggcctgttccaggcgggataccccttcggctatttgctggcggccgtcgcctatgggctgctgtttgaacaactcggctggcgcgggatgtttgtcattggcgccgcgccggtgctgctgctgccgtttatctatttctgcgtcgaggagtctccggtttggcaggcggccaggcagaataaagagagtacggccctgctgccggtactgcgtagccactggaagctgtgcctgtacctggtggtgctgatggcggctttcaacttcttctctcacgggacgcaggatctttacccggtctttttgaaagttcagcacggcttcgagcctaaaacggtcagcatcatcgcggtctgctataacatcgcctcgatcattggtggagtgttcttcggttcgctgtcggagaagattggccgacgcaaagcgattatgatcgccgccctgctggcgctgccggtcattccactgtgggctttcgccagcggctcgctggcgctgggggcgggggcgttcctgatgcagtttatggtccagggggcctggggggtgatccccacctggctcaatgaactggtcccggccaacacccgggcggtgctgcccggcttcgtctaccagctgggtaatttgctggcttcggtgaatgccactctccaggcatcaatcgcccagcatcatgggcataactacggcctggcaatggccctggtggccgggacggtggcgattgtcattaccgtcctgaccttttttggtcgcgaaggccgggcgatccaatccgcaggagcgggacatcaccagccgctctccaccagccgttaacttttgtgaccgggcgtggccaggcgcccggtcgcatacattagtcacgcagacaaatagacgccgcctggcgtttctccagcgagcagatcccaatccccaccatgatgaacagcgcgctaaacagatgccaggcatgcggctgggtatgcaggaagaggatgctcaacaccccgccggagagggggatgatgtgggtgtaaatttcgccccgcgtggcgccaatggtggcgatacctttgttccagaacaaataggccagccacgatgggaaaattaccagatacgccaggccgctgaggaaaaacagctcgcgccaggctgcccagtcctgcgccgggtggcgcatcagccagaagatgacgattggcaccaggatcagggcgccgagcagcgagctgacggcgacaaagccattcgccgggattcggcggtccttcagacgtaacagcgaacagtagagcgcccagctcagcgccgaccccatcgcccataggtcgccgacggcaaaggtgtgcagagaggcggcgtgcagcggatttccctgaaataagaggatcatcacgccgagggtgctaaaagccactccgagccagttacgccctgataccggatcgcggaaaaatagtcggttaatcaacagtaccatgctcggcgtggcggacatatagatggcggcgttgagcgcggaggtggtttgcaggccaatatagagcgtgaacgggaaactgacctggccgcagagggttagcaccaccaccgctggcgcgtttgcccgcagcaggtggcgactgccggcgatttgccgtcggtagaggaggcccagcagcagcgccgtcagcgcccagcgcgcttcggtcatcaggatcggatccacgccctgcaccagcacgtgcccgacaacataattcccgccccagaacagagccgccagcgtcagtaacagataaggcatgatgattccttgtgtcgtttgtcactgtactgaatggtaatgttattgtttttataatatcaataatattttagtggtttttattgtattcatttaaattctttaataaacagtaaattgaaagcgcgtgtgaaatttacgttgccgcatcatggacggtactataccgtatagtagccatgtatttcacagggataaatcatgcgtaacacagataatggggtgattggaagcgaccagaccgcggtgatggccaggctggcgctggatgagttaattgaccagcttctgcacagcaacgcgctgtcgctgaagctgacggccaacccgctggtggccgacagagcctggcatctcactgagaatacctgcatccgcgccttctccgctgacgatccacaggccaaaaagcgtgcgcaccacgcgctgttcattctctatcagtcctggcttgccgacccgctctcgccagcggctgccaatcagtttcatccgctgctttccgggatcagaaattacatcgagtctgagtggctgcgggcggaaagcaaacgcttccaccaccagagaccaatgcttaacgccggcaatatcgtcgacgaactgcgcgccttatgccagcagcacccggcttctcatcatccgctgttcgatttccttgccagcgaggcctctgcggcgcaaatcgactatttcttcaaaagcgacagcgccctcaatctgcttttcttcgatctggtggcgatggggctggtgggctcgctgccggaaacccgcgctgagattgcgcaaaatctgtgggatgagataggccagggcagcaccgagatcacccacgttaatctgtataaggatttactgaagcggcggaatatcgcgttgccggacaatcattttgcccatttgtacgagtggcaggggctggccgggtataacgcctttatgctgggcggcgtaaaccgtctgcattattacaaatcgctgggggtcatggcgatgaccgagctgctcgacccgccgcagtatgaaaaactggtggcgggctgtcggcggattgggctttccgagcgcgacgtgcattactatgccgaacatatcacggtcgatatcggccatgcggacggctggctgaacaatgtgattgtgccgattggcaaaaaacatccggcggcgatggaggaggtcttctttggcgccgcgctgcgtctgcaaacctgcaacgattactatgatggtctgctggcggccctgcagtcgctgggcggcagcttatcatctcacagcgtaccgccttctgagtaaataagcgctttggccgcgctccaggcggtcacccctggcgggatctcccggcattcggcggactcggcctgctgggcggcgatggcgccatcgatgagcatcaccatcatcatggccacccgctcggcaggttccggttttaacacctgcaggaggatatcgcggaagaactgccagaggagcgacttaaatcgggagcattgctcccggatcgccggcgatgacgcgccatattcaaacagcgcgcgggtaaacatgcagccgtggaacgtttcgcaggtaaaccagcgatggtagtagtcgaacacggcgaacagcttttcccgcgcgctggctttatccgcggtgatctgcgccagatcctgcataaattcgctctctttctgcttgaggatagccagaatgagcgcctctttatcggcgtaatagcggtagaaggtcattttggagatgccggcatgttcagcaatccgctcgatgctgggcgactgatatccttcgcgattaaacagcgtgctggcgtggcggagaatgtccgcttgttttggcttcatgcgttttcctgtcgaatggttcgctgtcacgattgccggtgacacggccgtcctgcgacagcggtgcattatgccggatcttgccgccagacgggcaaaaagtaaatcagccgcggtttatgcggcgtcggttccctcaataaaaacaagattgcgtagacatacacaagtcatgtccttatgtttctgaaccgacgtattattcggacctttatacacataagctgtgaatgatgtactttctgataggcattatttctgaagtctgagacggttacagcaggacaggcatcgaatgagggtattacagacatcattaccaggatgatccgataactatgatgaatcttattaaaagattgctgcgaagaatattcaggtcgttaatttcatattatggcccagctgtactgaccatcctcttcgccgtggcgcaagggctcttttttccagagacgcctctctggcttgttcccctgtttttcgtatttgttattgtaatgttttatcggtttgtgaaattttaatatcgaaatttaactttatattaaattgacaaggaagtgcgatggctgggttgaggctgcgcaggttaagatggccccgccattgcctgtctcattgagaagaagagaagagatgaaattacccctgaccacgccccggctgctgctgcgccggttcagaacggaagatctgccgtctttcagccattatcgcaatctgccggaggtggcccgctttcagagctggacccactacggcatgacagaggcgacagccttctatgaacaacagcgttcgcaggcctttgctgaggatgagagctggttccagcttgccgtagagatccaggccaacggtgcgctggcgggagatgtggggatccacttcttagatcacggcagacaggccgagctggggatgaccttttcccctgcgtatcagcatcaggggtatgcccgggaagccatgcgggcggtgatggccttactctttgaacagttagcccatcaccggctgatagcggtggtagacacccgcaatcccggagcgatcaaactcctggaagggctgggctttcgtcgcgaggcgcattaccggcagaatatcttttttaaaggcgagtggggcgatgagtacctgtacgcgctgttgcgcagcgaatatcagtgaagtgacgggcgagccgtcacttctggctatgctctgcaacacccaattcgactgtctcaagggaaatgagcatatagggggtaaagtcgacttcttttccatcgataagattgatcatcgaccctgaaccacagaatgcagcttcgtcacgtataagacagaatgacaattttttcttcactcctttcttttgttcttgtaaggaaacgttgttatcaatgactgcatatccatgcgcattaattgtctgaatattatacagatgtacaggctgcaactcgctaaggttaacaatgccatagacatccttagagcgctggatactttctttactcaaagtgtattttttctttttccatattcctgttttttcatcaaagtagactttttcaggaagcaacctgtttgggccgtatccatcatggatgacatcgacagaaaaccaacaaaaccaagtgttaaacggtgggttttttatttttaatgatgtgtattcactcggataatagtttttaaatgcaactttatcacatgtgttattcccgctaccattagatatggcgttattataattaacaaacctgtttttattgaagtcagagggtacatgtattgccggtgtgatggagcttacggctttttgtgataaaaatatcaatattagtaaaattataacccccctcatcatcctctccttaactgttctgattcgggttcttcattaaccaaaaagttattgctgtccgggaatttttgctcagtaagtacggctatcgcactaccgtatgcgcagcagcgttcattaaaaccatttaatccttgatattgttcattatcaatttgtgcgggtaaattaacggcggcactggcttgccagaaggcctgactacgatagtaaattttcaccccgtttcttctggtattgacgctacatcgctcgagtatatgttcgttatcagcgtaatatgccatatttcttgacgcccagtaaaatcctgcactgctagtcgcctcatggttatcgctgctgacattatccctccagctaataatgttctcaggaatgtggttttctgtatcagataggtgattgtcggtgtagcgaatgccccggtgtgaataaagacgattatattcatttatcagagtatctttgatgtttacaggatatactcgtcctctgaagctaaaatattcgaaataatttagtgggctggttagctgtaacaggcctcgtccataccacgggtagtaccaaatattatagcgacgaacgatctgatgcgtgcgtggatccctttccgtatagcgataaccttcctccattgttcccagccaccccgtctcctgaatcccgtttcccagaaagcaagcgagtcggagtggggtggttatcaggtgtttctgcattgctctgttaatgtgcgtgcggatattatccgcaaggcttccgacgccatcccggtagatgatggcttcccatcgataatcattctgtcccgccattcttaacagattgcgcggaacaatttgcttcaattctgatttgctaagccagcagcacctgcgaaaatgggtaatgaaggccactggatgaaaatgccatagtcgacctgtgccaagcgtgcccgtatcaaagcacagtgctaaaacatgacttttcaaccgctcatagtcctcatcagacatagcttgagtatcgtcgttattgttttttagccaggaataacgctgttcaaaagtgtcggcgttccattcgagtggaaaatgacaaaccagacggctgctcagatcgctaaggttcccactctcctgtaatcccgtgataaaggcggaattacactggctgttattgtccatgtcatcgtccaccattcgccagcccgtccagtgcgggaagtcggcatcactgaattttttgatgtcagaagaggccagatttacaagccctgagcctccggggaagttgacagtacgccacaacggggcgatggcagggatgagagtttcatattcagtactaataatccgaccaaagcggagtagttcaaagcccgcagagggattctgcgggtacagacgtttggctgtccagtatagattgtattcatatttcagacctaatcttcttatgtcgtcaatttggttagcatctatgtttactagaggctctcccaccgtatcgaagtgtgccccgatggtgatattctgcctacgagtaatcatcgaacagtcacctttttcgaaggtcatactgacaaacagtgcttcggcactggtatgaacgagatttaggcggtcggtatctgctgaggctgcgtcagctacagattcgtaaaaccgtgtcccagcgggcagataaaaatgaatatcaccataaaccgtatcggttctgccatcgcgggtgacatcgagttcgggtagcatgcgtccggttagtttcaacatgttttcattgtcacagaaaatctgaaagtgaaaggcattattttcatccaccatcccattctgtcctatgcgatccttgcgccagactttgcctccctcccttattgcgggactcagtcggtctctgaggtgcatatacagggagtaatagacgacgctacaactttccccgatctcggttttatgctttagcagaatatatccatcatcagttctgccattaatattcagcgggaatgcatcccgtctttctgtgtttgacggcgccctgaaagagacaacttctccatctgcaatcgcacgtacaaattcgatgcgattataaccttcatcaggattgtcggtgtggagaacatgtacaccgccatgccatgatccggatctgtttacaggaaaatcccggtttaaatcagtgggtatcattctttccacccatgatgcatcacattctccttcattccggggacgtataaatggcgggcttattatcatgctgactccctgtctgctttgttgaggctataaaagtacagaatagcgtaattttaattaattaagtactgtgcgttgttaaataaaaaaataacttgaatgaatttattagctgacgttatcaacgctatgattttcattacctgagaacgaaagtaatattaccggcagaatatcttttttaaaggtgagtggggcgatgagtacctgtacgcgctgctgcgcagcgaatatcagtgaagtgacgggcgaaccgtcacttctgcccggcggacgattagctatgctggcggataaagcgcgcgcgccacggttttagcacccacagcgcgagggcggcggtgataaaatcaaggccaatagcgcagctgaagactacatgccagccgtgggtgtactgatagagcagtgccgccagcgggccaccgaagattgacccgatgccctgcgaaatatacagccagccatagttggtggcggcatgctcgctgccgaacgtatcggtgagtgtcgacgggaagagagagaagatctccccccagccaaagaacaccaccccggagagcaggacaaacagcagcggatcttcccggcacgccagccagagcatcatcgccaccccctccagcgcaaaggcgataaacatggtttgctcgcggccgaagcggtcggaaataaacccaaacagcggccgggttaagccgttggtaaagcggtctatcgttaacgccagcggcagcgccgccatgccaaacaccaccgcctggctaatgccgaaatcctcggcgaacaccgccatctgcgaagtgaccatcagcccggaagtcgacatcatcgccatcatgacgaacatcagccagaacagcggctggcgcagcatttcccgggaagtaaacgatctgctgctctgcaccaccgtctgactgacgggctgggagacagcgggcggcggcagcttcagcccctgactggcgatgaagccgacgagggcgaaaaggatcccgaaagtcgtcatcgtgtgttcaaggccgttagtggtcagcgacagggagatggggaaggtggttatgatggcccccatcccgtagcccgccgccaccgcgccggcggcaaatccccgctgctgtgggaaccatttgaccatcaggccgacaacgccgatgtagacgatcccggtcccgaggccgcccatgcagccataaaccagccagagcgttgccaggccattcacctgcgcggaaagcacccagctcattcccgccatcactgtgccaatagcgatcagccgccgtgggccaaatttttccactaaccgcccctgaaaaggggaaaagaaggtctgcaggatgatcagcagcgagaaggtgacctgcaattctggcagaccgacgccaagtttggcggccaggggttttgtcaacagcgtccagacatattgcggactggagatggcggccatacagatcaggcccagcaccagctggcgccacttgccatatttcggggtaaccaacggttcgctgagtgtcgtcatgttgttctccgttttcagtaagcaggcttccgtgaaacgcatccaccctggatgcctcacagaaaggggaaggttgcgaccgcagactggcgacctgttgtggccatatggcatacgttcttgtccacattgcggtatacaagcgaagagcattaaacgtgccatataaaataattttttatattcaactggttaatgtaatgagggcatgtctgacggggggcggcatggtgaatgtgcggcaccagggcggtgcaaatgaattatcgcggtgcgctttacctgctaactggcgtaggagacatcgtataccctggactggcgctagacggacttcagtgcaaagccgcccaggcgggtcgaggctacgaaatcaccgcctggggcggctggcaagataaacgggaaatgaggctggcggtttacccgcttagtagcgaaaaaacgctactgtcccgactattttttgctttatgagctgggcatttattgtatggactctcgcagagagacattcttcctggtagaaaccctggctaccacacacagatactagataggggaagccttatcgccctatattaaactcatgccgcggtactggcccggactttgagcactgacggaatttcaatgaacttttcaccaggcttatcgttaagcagttcgagaagagctttaccggctttcaccccaatgtcatgccagggaaactcaacggttgtcagggcaggggaacagactgtcgataacactcctccgcctaaactcgcaatggctacggtattgggcaccttaatgccggcactgtggcaggccatcatacatccacaggccatttcatccgacgtgcaaattaacgcatccagatcgccccaggtaatcatcatatccttgaatatattgacgcctgtggcgatggtagatggcaaatgcgtggttaccacccggtgcggggagcggttcagagcgagcatcgccgtattccatccgctcagcaactggcgaaacattgtgttattagccggggtacagagcagtgcgatgttttttaatgaggcgtcggccagatgagtcacgatctgttttacggccttaccgtaatccacgccgatgcacatacccacagggtgggtatttagcgcgccaatttccagaataggaacatccacgttggccagcaactgggtgcagctctcaatggtatcgatattgaactgaataatggccgccgggttataggcgagcattttttcaaacgtcttttgttcactttgaccgtcatgcccggattccataaacatcatggtatatccgcgttcggtcagcactttttgcagcgcttcagagaccggcaaaaaacccggcgaagagaaggtgggaacgacggcgagaataagatcggaatggaccgacgccagattacgtgcctgcagattagggacatagccgagttgactgacggccgcatcgatgcgatcgcgaagctcaggattcactttttcaggcattctcagcgctcgcgagacggtcatggcgctcacaccgacaaactcagccacctcggtcagggttatcttacccgttcctttacgtcgtttttctttcgggctaccgtccgcgtctaaactcttcaccaaaatcaccaaccgtttgaaaaataaaatataacgaaagtatatctgcgaatcgcattataacttaccacagcgagggggaaagcacattatagccagtgttagcggtaacgcactttttaacatttttctttgttagcgctaactttgggaggtgtatcacagttgcattttatttagctgtttatagtgcagcacatagaccccctcgggagagcatatgatcagagactggttaaccccggataaaattaaagtcattaactcaatagatagctgggaaaatgccgttcgacttgcagcagaacccttgctgatgcaagggtatatagccgggtcgtatattgaggcgattttgcaaagccataaagaacttgggccctattacgtattagctcccggcttggcgatgcctcatgcccgtcctgaacagggggtgttaagaaatggattatcgcttcttcatattaaagaaggggtgtcgttcggctcgacagagaacgatccggtatacgtggtaatcatactatgcgctcgttccggaaatgaacatatcacgatgattggcgaactggctgaaatctttagcgatcagcaaaagttacaccgattgttaaatgccgatgatagcaaggcgattcaggccgttattgactgaaggaaaacagaatgaaaaaagtgcttatcgtgtgcggtaatggtttaggcagcagcttcatcgttgaaatgaatgtcaaaaagatccttgccgaaatgaataaagaagctgaagtcgcacataccgatctgacgtcggcaaaaagcgaaactgccgatcttattctcagcgccaaagacattgcagaacatcttagcagtcactctgcaaaggtcgttggattaagtaatttacttgataacaataaaattaaaaaaattttagcagaaaacatttaagcaacggctatctgattcgtggagttaaacatgcttcattttcttatttatgatgtgctaggaacaccggcgatactggttggtttattttcactgatcggtctgctgttgcaaaaaaaaggaatttcagacgttatttcaggcacgctgaaaaccatcatgggttttgtcatattgaccgccggcgccggtattatagcctatacgttaaccatctttagccagttatttgagcattctttccatattcagggcgtggtgcccaacactgatgccatggccgctctggcgcaaaagaattacggcacggaaaccgccaccattatggtattgggcatgctgatcaatatcgccctggcgcgtctaacgccattaaagtacatctttctgaccggacatcatacgctttatatggctgcgatgctggcggttatcctgtctgtagggggcttgtcagggggatgggtggtggccatcggggcggttattctcggtgcgatgatggtcatctccccggctatcttgcagccgtttacccgtaaaataaccaacaccgacgatctggcgctcgggcattttggatctattggctacctgctgtccgcgctggtgggcaaaattattggtaaaggtagtccctcgattgaagagatcaaagtacctaagtcgctcaatttccttcgcgactcatcggtggccatctctctcaccatgatgattctgtttctggtgctggtgctcgttgcgggcaaatcctttgtcgaggagaccctgagcgctggtcagaactttattatcttcgccattattcagtccctcacgtttgctgcaggagtttatatcatcctcgccggggttcggatggtgattgccgagatcgtcccggcgtttaaagggattgcggacaaactggttaaagacgcgaagccggcgctggactgtccgacggtgtttcccttcgctccgaatgccgtcatcgtcggcttcctcgcaagctttgtcgcaggactggtcagtatgttcctctgcccgctgttcggcttgagcgtcatcgtcccgggcctggttccccactttttctgcggggccacggcgggggtttacggcaacattaccggcggacgtcgcggggcggtggtaggggcttttgctcacggtctgctcatttcgttcctgcctgccattctcttgcccatgatgggggatatgggactgggctccacaacctttggagacgcagactttggcgttgtcggcatcgtgctgggtcatatcatcgcaatgtttaactaactatttatcggaggtggtttatgagcgctaaattttcaccgtcactgatgtgcatggatttaacgcagttcaaagagcagatcacggcaatgaataaaaaagcggatttttaccatgttgatataatggatggcaattacgtccgcaatatcacactgtctcccttttttattgagaatctgaaaaaaattactactgtgcccattgatgttcatctgatggtgaatcatccggaagatatcattcccatgtgtctcgaggccggcgccgatatcatcagctttcatcccgagacggcgaataacaaaatattccgcctgctgaatcagatcaaggatgcgggcaaaaagtgcggggtggtgctgaacccggcgacaccggcagaaagcattgccgaatatgcgcatctgctggataaagtgacggtcatgtcggttgaccctggctatgccggacaaaagtttattcctgagtcgctgaacaagattagaaagctcatcaacatgcgcaaaaataatggctatcactatctgacggaaattgatggctcttgcaatgagaaaaccttcggtcagattgctgaatccggggtagatgtctttatcgtcggcacatcgggtctgttttcgctccatgaggatgtcagccaggcgtgggacagaatgatcgagatcttccagcgggaaactgtcgctgcataacggttatttctcttcgaaccacagtgtgtatttgaataagccttaaaagatctgcatcacgccagcgatgctggtttgttatttaacgactactctatatgaatgcgggtgaatcatggatatttcgacagtgcttaatgttaaaaacatcaagttaaatatgaccgccagaaccaaagaagaggtgatagaagaactcaccgatttacttatccaggatggcgccgtcaccaataaggaagactttattcgtgatgtctggttacgcgaggagctaggctctaccggctttgaaaaccatatcgctattccacatggtaaatcttccggtgtttcccgtaccgcattagccatcggacgcacgcaacatgccattccctgggagaccatggatggcagcgatgtccgctgtgttattttatttgcggtttgcctggtggatcaaaatgccacccatattcgcctgttggcacaagtgtctgggtcactggcggatgaagacattatcgctaaattacttgttgaatctgatccacataaaatcattgcgcttttcaattcagaaacagaaaacgccgatgcttaataccaacttgctaatatcgattagtaatttattaaattaattaacggagaaacattatgaatattgtcggcgttaccgcctgcacggtggggattgcacatacctatattgcgcaaaagaaaattgaaactgcggctaaaaaagccggacataacgttaaaatcgagacgcaaggaaccatcggcattgagaactcgttaaccgctgatgagattgccgcagcagatattgtcctgcttgctgccgatgtcaaagtaacgggcgaggagagatttgccggcaagaaagtcgttaaagtcgcgacggaaacggcagtcaaatcccccaataagttgattgaaaaactcagtgaactagtcaattcataattttatttcggcctggcgactctacattaaagggcgtgacttatgtctctaaaacaaatatggcaagcagcaaaccctaaaggacatctgctgaccgctatctcgtttctgatccccattgtctgtggttctgggtttattatcgccatcggcatggggcttggcggaacggtgcaggacacgttaactccgggacaatttgatgtatggcaggcgatggccaccctgggcgccaaggcgcttgggctgttgccggtggtgattgccgtgggaatatctggctcgattgccggcaaaccaggcatcgcgccaggatttgtcgtcgggctggcggcgaataccataagcgcaggctttatcggtgggatgattggtggctatattgcggggtatattgcgctggcgatcattaaaaacgtcaaggtgcctgactgggcccgcgggttgatgccgacgctgatcgttcccttttttgcctccattatcagctgcctgattatggtctatatcatcggtacgcctatcggtatctttacggaagcgcttacgtctttcctgagaagcatgggcacgtcgtcgaatttggtgttaggcgcagtcataggcgcattgtgtattgttgactttggcggcccgctaaataagacatgctttgctttcgtgctgaccctgcaggcgcaggggataaatgaacccattaccgcacttcagttagttaacaccgctacgcctatcggatttggcctggctttcttcattgctaagcttctgcgtaagaacatctataaccgtgaagaagtggaaaccttaaaatcggcggttccgatggggattgtgaatatcgttgagggttctattccgatcgtcatgaatgatattgtgcgcggtatcgcggcggcggctatcggcggcgcgtgcggcggggcggtcaccatggtctatggtgcggatgcgacggttccttttggcggagtattgatgatccccacgatgtcacatccgatggcaggcatcatggccctgctggtgaatatcgttgttaccgccacggtctatgccgtcatcaaaaaagatatccctcgcgacgtgattgttgataatgattacgaagaagaggatatcgacctggatgatattaaagtgagctaacgtatcccagggttattttaaatcaacattaagctcttcctgtaagaacatcagcccatgactaagcattacttagtcatgggctaccctttgcatctgccatccccgaagtaaaatggagcagggtaagcagaagatcaggggaaataattttattgcaaaaatgtgaacccttcagtagccttgtctctttcggagacaggaaatgctcgtcactgattcacttcttgcatacaccctcgctgccacactgcttactcttacaccaggtctcgataccgcgctcatcctgcgcacggcgaccgctgaaggtggacgcaaagccttgcatgccgcgttaggcattgatctcggatgctttatttggggcgccgtggtggcctttggcttaggggcgctgctggcggtttctgagttggcttataccttgttgaaatggtgcggagcgggctacctttgctggctgggcatccagttgcttctgcgcccgcgccagcaatttaacaccactccggcagaatccactaccaccagtaactggtttctgcgtgggatgctggggaatgtgcttaatcccaaaatgggtgttttctacgtttcgtttttacctcagtttatccccgccgggcattcacccgtgagctggacttttctcctggtcgctatccatgtattgattggtacgctgtggtcgttaacgctgattaccgccactcgctatgccgcaggcatcctgaaaaaaccagccgtagtgaaatggatggatcgaacgaccggctgcctgtttctgttgtttgccgcgaagctggccatgagtcggcggtagtcacgcaggggcgtatgcccctgtttttgccttaaaaaatgagcaacccgtggagtactactcagtggtgaaacgatcgggctcgaacgtacgtttagccagtttcttttgcaaaacgatgacaataattggggttcctgatgcggtaattgcacataccgccaacagcgtatccatattttgtagcgccatgcgatggtcgggtaacaaaaaagcagacaggaaaaatgcggcagttgtcatcagatacatcatggatgtctgtaatgaagagaatcccgctcgttgcttgttatcaggaaactgaatcgtcaccgccgacgatgacaccagacgactgtaagctgcgccgagaaataacgtaataaatagcgctggatgcggatagcccatcacgggtatcagtaagctcaggataaaaacgagggtcgacccggtcgccaaactcaaagcagaaacacgagaggttaatgcgcctgtcattctggtagacagataccccgccaggcccccgccgaagaacaaccagggcagcagaccttgagaagcccccaacagctgcgtcattaatggcgccaggacaggaatgatcagcattggactaaactgtaccagcgcattaccggaagcaaacagtaaagtatctacatcgaggggcagcgcgtgggacgtgtcgaaagtgacgggatcctgagggatgatggagacgatcagtggcaatgccaaccaacacagtgtacaaattaaccacaacgcgacatgccaaccgtaatgagtacacaaaaatagtacagcgggcatccccacgatgctgaccatcgaaaatgacgcaatcaccgtcgccaacatttttccgcgcaagtcagccggtgtgtggtttatcaaaatagtgatccccacagccattgtcgtaccgccaaccagtcctgcgaagaagcgcaatgtaagaagaagaggaaaactggtagtgaatgtcgtcaacagtgtcgccatggctagcagtaccatattagcgcttaaaaaatgcttcttattgcaacgatcaatccagtaaaaggcgataattcccgacaggacggctccaaatgtgtacataccggatacatagcctgagaaggtgacgggaacagcgaaatctgcagccataaatgtaaaaacagggctgaacatcatatattccagcgcattagtaaactggaccaaagcgattaccatagcaatccgaatgagcgtcttttgattaaatgttgtggtgaccagtggcatagcaagcgacctgtggatgaaagatatcctagcttaactgctatcaaacttgtcgattagatggtaaaaatggcactcattattatcatatgtgggatagttgatgcggccagttcttgactttaatgcgctgaaaatcttcattgctgtggtggaaagagacagttttgtcggggcatcgaaagccctggaaatgccgacatcaaatgtgagccgttgcatttctcagttagaagacaaactgaaccttcagctcattgagcgcagtacccgacatatgaagctcacacaggctgggcatctactctatacccgggcgaagccattactggaagcacttgagcaaactgaaaccgaattaacgttgcgacaaatgcaattcaaggggccattacgtatctgtattcccaatgaaatcggtcctgtattgctgggctctgttgttgctgatttcgcctgtcagcatccggatctggagataagttgcgtcacaaatttgtcgggttatgaatccctgcgagatgatctggatttagctgtcattgttagccgtggtcagatggatgacagtgactacatcgcccgtcatctggtgacgatcccttgcaccatcgttgcggccccctccgtcatccagcgttatggcacgccttctcgaatacagcaatttgaagagttaccctgtattacaacggtgaatgcgcttaaaggcgctccctggcagtttgtgaataaaaagggcggattcgagacgatcaaggttaacggtcgttatcgggtcaacagcggagagatggcagggcgagcggccatctcaggtgtcggttttgccatcctgtcgaaacaagcctgccaaccctatattgatgatgggcggttaatcgagattgaatttgaacaatcggcagcccccttgcaattgttcgctctgtattcagatcggcgttacttgccggcaaaaacaagagcgcttattgatttcatgcatcagagattgagtcattaacaagaggccatcttcagcgcgccagggcagcgctgttttattcagccggccggctcaagcaacaaatctctgatatagccctccagcagggaggcacaaattcgcgtttcatacgacatcatcccagctggtggatggagcaaccaggcactaaatggcgggatcggatagtggcttaagagggggatgagcgcgccgtctgccatttcttttctgcaaaccggactttgcaaaacaccaatggcatgtcccgctaataaccaggagaggacactccgccagtgcgtggactgaaattgaatattgacgggaacattaatgagttgatcttcggaagcgaccaattgaatgcgattactggcgaatacaccggaaacagcagcaaatggataatctgtcagcgcatccggcgtgtcaggatgacccattttcgccagcagagccggagaggccagtaacactctgcgcacggtgccaagcgggcgtgcgacaaaaaaaccttcggagacatcacctaatctcagtgataaatcgaccccctcggtgacgggatcgatgacgcggtcgttaaaaatgacatcgacctgcagcgccggatgctcgttctgaagctgcaacaatgcaggcatcagcaagctttctccggcggaatagggcgcggcaatacggattttgccttgcagcccctgattttcctcactcacagaaagagcatgctctgccgcctgaacggccgttttgcttcgctcataaaacacgttaccgctttgcgttagagacatgttacgcgtgttgcgcctaagcaaacgtgtcccaagatgagcttccagtttttctattctttcactcacggcgggctggccaataccgagatcgcgggctgcagccgacatgctgccccgttcaaccaccctgataaatatgcgcattgctgagaagagatccattcaccaattatattggctttaccgataaatgtaagtggggacaggtatctactgctttactgcgaaatgatgaaaaatccagactcaaggcctgagtcaggctaaattttaatctatttaattgatttattggtggaaaataatgatgccagagataaagcttttcatgttccagtcaggaacacagcattgtcgatatcagcatatccggatgaatcagggcgtgggagagcattatgagatccctgtcccctggtttctgctgacccatccggatgggtttacgctgattgacggcggtctggctgtcgaaggattgaaagatcccagcggttattggggaagtgctgtagagcagtttaaaccggtgatgtcagaagaacagggttgcgtggaacaacttaagaggattggcattgctcctgaggatatccgctatgtggtcctgtcccatttgcactctgatcatacgggagcaattggtcgcttcccccatgctacgcatgttgtccagaggcaagagtatgaatatgcctttgcccctgactggtttacttcgggagcctattgccgacgcgatttcgatcgtccccaacttaactggctatttctgaacgggttgtccgatgatcactatgacctttacggtgatggcacgttataatgtattttcaccccagggcattcaccgggccatcaatcttttattatccgcttaccgggtggtacaaattttacgctagcgattgatgcggcttataccttagatcattaccatgagaaggctctcccggggctaatgacgtctgctactgatgtcgctcagtctgtgcgaaagctgcgtcagcttaccgagcgatatcatgcggtattcatacccggccacgatcctgaagaatggaaaaaaaacaggcttgcgccagcctgttactattgaatcattcctcgctgatcgccaaaaagcgtctgttaagcagggctgtcagcttatcttgttcgaaatggccctggtgatggccggggccatttctgcgggcaagctcagggcttcacgtccagcacgacatgactgaaggtttgataggttttttcgtccggcgcgggcgggatgttggcttttttcagcgcggacatcacctgcgcgcagaatggccgatcgccgctctcgaccgttggatcctgcaccgtcccgtcacgctgcagcataaagcgcaccgagcatttttgcccttgccaggaggccggctggtctatgttagcgaagatagccgcctggatccgcgccagatagcgtgaggcattggcctggggtgaagtatcggaacccgtttgataatcgcgaagtatcttatccacttcagccgatattttagcgtcttcggcgctgcccggcgcagaagcacgacccgagcaggcggaaaggagtaaagagagggtgcaaacgagcacagcgttggttttcacggacatgctaagcctccttgctggtggtgataccgtcgtgtacgaggcggttatcctctgttattccgcgatattattcaaacgctgaattgcatggcacgcgctttcagtgacagtgtcactcattttttactttcgtcgcgggcggtgatgccatccagtcgcgaatgatgtcaccgtatagctgttcggcctccgccagtcggctgagcaggcagtattcgtcggtttgatgcgccatcgacggctcgccggggccgagaataatacagggcggatcgcccaatgcaggcagcagcagcgaggcgtcggtaaagtagggcaccacgcgcggcgcaatcggctcagcgtgcagcggctgacagcgttgataaacctgcttaatccacgcatgatcctcccggctgaggacggcgggcaggtcgaccagcgtggagacggtgacgctttcgccaagcagcgtcgtcaagcgctcccggatagtggcgtgctgtaaattgggcgcgctgcggatatcgacatcaaaacgcgtgcggtccggtacggaattaatattgagtccgccttctatgcgtccgacgttgagggtgggttgcttcattagcggatgcggcgcgcctggcgaaaaatgctgaatcttacccaacgcatccgccgcaagataaatagcattgatccccagctccggcatcgcgccgtgggcggttttcccccgcgtttcgcagcgtagccagagcgcgcctttatggccgataaccggatagttggcggtgggttcaccgacgatcagcgcgcccacctccggcaacgttgtggaggcgatcagcgcccgcgcgccgtcgcagccggtctcttctccgccggttatcagcaataccgcgccgcgtccggcgaggatcgcttcccgctgatgaacgcaggcgacggcaaacgccgctatcgccgctttcatatcgctggatccgcggccataaagacgcccgtcttccatctgcgagccgaaaggatcgtactgccagcgggcatttcccagcgggacggtatccagatgtccggtaaaggccagcggtttaccgctcttcgccccgggcaggctggcgataagattgcagcgtccttcgccgaacgacgacagcgaaacctcaaaaccgctatcgtcaagccagtcggcgaagaaccgcatgcagtcggcttcgctgcccggcgggttgatggtgttaaagcccagcagctgccgggcgagctcaagggtcgcggtcatcagcggcgttccgtcagccagtcgaggcagttaatccacagctggcgatagccgggccatttggcaaactcttccggcagccagtgcgccgacatgtcgctggtccacaccagcgagcgaccctgctgatattcgcgaacagccaacagcggatgaccggtaccggccacggtcgccagcagtttgccttccgggtgcatttcaacttcgttatagcccagcagccacggccattcgcccggaatatcgttaaacagggggtgagactccgtcacttcggcatagcagccttccggggtttcaatgcgatcgtcccaggccaggcagcgtaccggcagcactttctccacctcggtatggcggtagcgcgcgccgccgttgattccctggaagctgtaatagccgccgatcatcatcagcgcccccccgccggccacgtaatcatgcaggagcgttaaacggttggcggttcggcggctcttcagccaggtgtccggatgcagcagcagcgtattggcgccaatgtccgagagaataatcgcatcccactcctgcagcgcttccagcgtcagcggaaagtcggtcgccgccgcgtgggcgggcatataggtaatggcatagggactgtcggcgagcgcggccagaaagtccgttgcgccggtgtgccaggtggcggtggcaaactggtcgaagcctttaacgtgcgttgacgtgctggtccaggactcaccgaccagtaagatttttttctgcatgatgacgtttccttttatccgccaaagacccgctgggggtttccaatcattaaggtttcaagttgttcgccgctgacgccgtggcgccgcagacggggaacaaaatgcttgagtatgtagccataaccgtggccgccgtagcgggtgagcatggttttcaggaagacgtcctgcgacagcagaatttgctggatgtagccgtcgtcaatcagctcgcggatcgcgcgggcgttctcctcgtcggagggcgactgcgccgactcgtcggcgtagtaatagctcatgccaatcatgtcgtattcgagaaacgccccgcgctgcgccagttcgcgctggtagcgcttatcggcaaagctgggattcatatggcacagcacggtatggcgtaaatcggcgccttcctgctcgagaatatccagcacccgatggcccagccgctcccagccgggcagatggacctcgatcggcacgccggtcgcggcgctggcccgacccgcagcgcgcagggatttctcctcatccggcgtaaagcggctggagataccgatttcgccgatgagcccggcgagcacctccggtttctcctccgcgccgccaagatcgtaaatcagccgttcggtcagctgttcgacgctgctgatttttacccactcagggtgcgaaggttccagatagagcccggtacccataatgatgttcagaccggtcagccgcgcgatgcgcgccagcgctttcggatcgcggccaatgccgatattggtcgggtcgactaccgtttctccgccaagggcgcgatatttagtcagctcgtcaatcgcaacgtcgacatcaaacagctgacagttatcgcggctcatcagcgggttgagcgacagttcgccaaggttttccattttcaccggcatttcggcaagatggcgatcgctgcagcagcagggcggcacccatttgccggaggcatccagcagaatatgctcatgcatcagagtaacgcccatttcgttaatcggcagtgggccaagcacagtcattacgtaaccgctgctaacgccaaccggcagcggggagggatggcgaaaaattgatcctttcatcagctatccttttgccgcggagcgcgtcgggttgagaatgcgggtgttcagccagatagccagcaggataatggtgccggtggctatctgggtgtaaaacggcgaaatatgcgacaggatcagcccgttctgaatgaccgcaatcgacagtgcgcccagcagcgtgccaataatagttccgaagccgccaaacagactggtgctgcctagcacaacggcagcaatgacctgcagttcaaagccttcgccctggttggaggagccgctgccgaggcgtgcggtaatgatcatccccgccagcgcggcggccattccgatgatgatatagaccttcatggtgaccgctttggtgttaatgccgctgcgccgcgcgccttcggcgttagcgccgatggcggtcacgtagcggccaaagcgcatatggttgagaacgatatgcccgatcagcagaatcagaatgccgagcagtgcgggcatggggatcccgacgacccacgcgcgtccgataaaggtaaacaggctgtcagccggcaccggaatcgagtagccctgggtgaccagcagcgcgatgccgcgaactacggccaaggtggcgagcgtgacgataaacgccggaatgccctcataggcaataaagaagccgttgatggcaccaacgaatccgcctagcagcaggccgccgaggagtaccaccggccacggcagaccccagctattcagggcgatagcggagagcgcgccgaccagcgccagggtggagcctaccgacagatcgataccgccggtggtaatgaccagagtcattgccgtcgcgacgatcagcagcggggcgctctgacggataatgttgagccagttggtgccggtgagaaagttgctggtgatcagcgaaaacaccacgcagcagaagacgaaaaagagcgcgatgctgaccacgcctgagtggttatgcagcaggcggcgcggcagcgaatgctggatcatgcgtgagctgctcaagttcatgatactcatcctgttacctcaatgtgctgccgcagagcgggcggtgaatttttcgcccacaatcaggttaacgatatcgctcaggctggtgtcggacacccgtctgtcggcgacgttcgtaccctcatacatcaccatgatccggtcgcagaccaggaacaggtcctgcaggcggtgggtaatcagaatcacgctcaccccgcgagcggaaacgcggcgaatgagctccagaaccgcttcaacttccgcgacggccagcgcggcggtgggttcatccataatcagcactttcgggtcaaaggccgcggcgcgggcgatggctatagcctggcgctggccgccggagagatttcgcaccagcaggcgagtatccggaatggagatcccgagccctttaagcatctctctggcatcggcgtgcattttggcttcgtcgagaaaggggatgccgaggaccgatttcatcggctcacggcccataaacagattgcccgcgacatcgaccgtgtcacagagcgacagatcctggtagaccatctcgatatggcaacggcgtgaatcggccggattcgtaaactgttgctgttcaccgtcgatacgaatcgtgccgctggaggggatcaccgcgccagagagcactttggtcagggtggatttccccgcaccgttatcgcccactaagcccagcacttcgcccggggccagctcaaggttgactccgcgcaatgagcgtatcgacccgtaggtcttggtgatattgatcatctctacccttggcggggtagtttgtggctgctgcatctgataactcccatcgctgtggccgggaaaatgttcgccatcctgcgggagagactctatccgacacggtttacaatctagtaaaccggtttacctgcggaccagagcactcgccagtgcagtcaggacaaacgctatgtaagatatttgttcgccagtaagaacattgcagcatccgtgccagggcagtaaccacacagcagccctgtaacttaaccttatgtattcaatacacttaattgaatacaatccggtaaaccggtttactgattatagtgaataaattgttaattgatcgttttttgcgccaaaagcgggcgcttttgcgccattttgggacgggcttaacaaatcttgatcgagtcgcggccaatccattcaaccggcaggcgggtttccgcagggatatccggatcgtcgtttagcaggcgcatcatgatgttcaccgcagtgcggcccagttcgcgggcgggctgacggatagtggagatccgcggctgggtaaaatcggcatagttggcgtcatcgaagcccactaacgatagcgcctctggcgcctggagcccactggcgcgcaagccgtcgagcagaccgagcaccagatagtcgctggcagcgaagacggcggtggggcgaaccggttggctgaacaggtaccgcagcgcctgctggccaaactcgcgctggtagtcgccatacatcacccattcgggcggccagctcaggcccgcttgctccatcgcggtgcaaaagccctgatagcgctcgcggacgctcatcagcttgtccgggccaccgacgaaagcgatatggcgatgcccggcggcgatcagtttttcggtggcgatccgcccgccctggacgttatcggcaaacactttcggtaccttactgccgggaatatcttcatccagcaggacaatccgttcgtgacgctggacttccttgcgcagcaggccattatcggggcggttggtggtgaacagcagaccgtcgacctggcaggtatccagccagcgaatgaactggcactctttttccgggttgttgcgggtgatacacagcaccaggctgtagccgctggcagaagcggcctcttcggctgcgtcggccagttcggcaaagaaggggttggtaatatcgggaagcaccaggccaagcgtttcgctgccgcctttgctaagacggcgtgccaggctattgccgcgatagtccagttcgcgaatggcggtttcgatgcggtcgatggtgtcctgcggcagcacaatactgttgttcatatagcgcgacagggtcgccttcgacagcccggccagctttgccacatcggataacaatacacgttttatactcatttcctgcgccatttctgccagaatcggctatctgtaacatagttaagcgcggtggatacagcaatttctctgcgaacaatcaccaaaaataaatgcttgacaaattttaatcagcggagaattgtataggcagtttaccgcatcattcgggaagtcattcccaaccccgtttaagttattccagtcgcgcaccgacacggaccggttgccgggatgacattaagcaggtatccgccgaacgttcaatgattgttctggcgatatagacgatatttgcccgccaaaaaaataatccttctgcgttcgcatgcggcgcggaactctgctggctatcaactattcccgacgaggatactgatgatgttatttcacaccggaaaactgcgtttccttgctgtcgccacgaccatgctggcatccatgagttttatttctgccgccagcgctgccggtccgacttatgcgctggtacaaatcaaccaacaggcgctgttctttaatctgatgaataaaggcgcacaggatgcggccaaagccagtggcaaggatttagttatttttaactctaacgataatcccgtggcgcaaaatgacgcgatagaaaactatattcagcaaggcgttaaaggcattctggttgctgctatcgacgttaacgggatcatgccagcggttaaagaagccgccgccgcaaacattccggtgattgcgattgatgccgtattaccggccgggccacaggcagctcaggtcggcgttgataatattgaaggcggcagaattatcggtcaatacttcgtggactacgtgcagaaagagatgggtggccaggcgcgactgggtattgtcggcgcgctgaattcggccattcagaaccagcggcagaaagggttcgaagagacgctgaaaagcaatccgaagattactatcgctaacgtggtcgacgggcagaacgtgcaggataaagcgatgactgcggcggaaaacctgatcaccggtaacccggatctgacagcgatttatgccaccggcgaacccgcgctgctcggcgctatcgccgccgtggaaaaccaggggcggcagaaagatattaaagtctttggctgggatctgacggcgaaggcgatttccggtatggacggcggctacgtcaccgccgtactgcagcaggacccggaaaagatgggcgccgaagccctgaatgcgctgaacagcatcacgtcgggtaaaaccgtgccgaaaaccattctggttccggcgacggtggtgaccaaagcgaacgtcgattcataccgtccgctgtttaagtaggtcagcgcgcgccgcccgtggttaacagggcggcgagctcatggctgccgggaaacgcgctgagcgtcccccggcggctaaccgtaatggcggcagcgcgactggcgtgcgccagcgccagcgcatccggcgcgacgccgcgcagcagggcggaggccaacatgacggcgaggaacgtgtcgcccgcgccggtagtatcaagcgcctcggcgggcacggcgggacaaaactgacgctggccctcctggaccagccaggcgcctgcggcgccctgggtaatcactaaggttttcaccccgtatggctggagcagctcggcctcagattcattgaccaccgcgatgtcgatgaggggccacagatggcaaaagtcaggattgacaggtgaggggttgaataccgtcgtcatgccgcggcttctggcgtactggaacagcgcccgcgttttatcgagggagaaattgccctgctgtagcagaatatcgccagcgacggcatccgccatatgcggaatcatttcatccaggctgaatgtatcggccgccgccgtagtggtaatgatggcgttgtcgccatcagcgctatttaaaataatcgaggtatcgctatgttgattgaaatggccgtcgggtagtagcgtcagtggttcattttttatctgctggcggatccacgcgccgttgctgtcatttcccgtggcggcaattaaacgcgtctctattccgcagcgggataatataatcgcctggttcgcgcctttaccgccgatatcctgcgacactttaacgccgtgaatggaggctccttttttcggtatatccggaatggaccaggtttcatctacggtaatattaccagtaacgtaaacacgcatagtgttcccttaacaggatggataagatggttgctatctcagcagaaaaaacgaatgcaatacaagctattttttcacgaaacaaggctgttattggtgttattcattgcgacccatttcctggctcgccaaaatatcgaggaaaatcagtctcggatattgttgaacgtgcgcttcgcgatgctgaaaattatatttcaggcggtgttcatggtctgattattgaaaatcatggcgatattcctttctctaaacctgaggatatcggccatgaaacctcagcgctgatggcggtcattaccgagaaagttcgtgaacgttttgctgtgccgctgggcattaacgttctggctaacgcggcgatcccggcaatggcgatcgccctggcgggaggcgccgatttcgtccgcgtcaaccagtgggccaacgcctatatcgccaacgaaggatttatagaaggggcggccgctaagacgctgcgctaccgcagtatgctgcgcgctgaacatattcgcgtttttgccgatagccacgttaagcacggtagccatgccattgtcgccgatcgttcgattcaggaactgacgcgcgatgtcgatttcttcgaggctgacgcggtgatcgccaccggccagcgtacgggcgatagcgccacgatggcggaaattgacgagatccgtgcggcgacggaactaccgctcctggtgggctccggggtgacaccggctaacgtgaagcagatcctcgggcggactcagggggtcattgtggccagtacaatgaaggtcgatggcgtctggtggaacgatgttgagctggcccgggtgaaacattttatgtcggtcgcgcaggccgcgctggaggaagcttaatggaagcgtttagcgaacgcctgctgcgcgaacatcaaccggcgtggcaggcgatgcagcagcacccgtttgtgactgatatcgaacaggatcgtctgccgacagtcgtcttcaaccgctatctggtgtttgagggcaactttgtcgcgacggcaatcgcgatttttgccctcggggtcagcaaagcgccgggtatgcaacagcagcgctggctgattggcgtgctgaatgccctggttgatatacagatcgcgtggtttgaacaggtgttgtcagcgcggcagatcgatcccgctgagtacccggatgatttgcccggggtacggcgctttcgcgacggtatgctgcggatcgcccacgagggtagctatgagcagattgtgaccctgatgttcggtgcggaatggatgtactatttctggtgccgacgggcgagcgaacattatcagagcgatgctgatttacgacgctgggtggaaatgcacgcggaggacgaattttatcagcaggctctctggctaaaaaacgaactcgaccgctgcgccatggcgctgagtgaagacgaaaagcaggcgttatcggcgctttacggcgaggtgctgcagtgggaaattgatttccatcacgcggcgtacgaggagtagccgcgaggtgaaaaacaggaggcgccggaagcggcgtctcctgaaatattgctcaggtcgtccgcctcttatccgggcaatgtctctccagccattgtgcgacgaggggccataatttctccgcattccgggtacgaaagaagcccatatgaccaatggatgaaagtccgtaatccgcccgccgtatttcacggcgttctatttttgcgttttgcgctggagcaagcaggcgtgagatggcttctgtattagcccaggggtcgtcatcaaaacccaacaccagaataggtaaggttatctttcctgcccgctgacgcgcatcccactccgggtcgtcatagaaatattcaggcatcgcgctccagcgtccccactgaagcatcgccggagccggtaaatcttcacccagcccgagacgtctggctggcatatacccaaagagccggcaaagtgccggccccaaaacgcgcagtaagcaccatactcgcagcttttccttcgtttggctgatagtgcttgtcacgcctgcgtgtgaggcaaccatgacggcggctcgcaggtcggtggaggcggaagataacagcacggcatgcccgccaatactgtgcccaatcgccagcagggtaaggccaggggctcgggctttcgcccacgcggtgatgcatccgacgtcctgctcgatccagtcggacatggtgtttttgttgtgacggactctcccggacttcgaaagaccagtgccccggtaatcataagtaatgacactaaacccccttttataaaggtattcagcgaatcctttataaaatccctgtacaacggccgtcgccgggtgaacgatcaccaatgctttggctttgtgtctttgccagagcgtggcggcgacaaagccgccctggcttacggggatgatgacagattccatgagtctcgccttgtgtggtcataccagtttaacctggatttactgtagctgctgcggcagaaatcagcgaatgtttttgagacgatctcagtaagaaaaacgtcctgaaagcattggcgaccagaatcaggagccctcaggcggggtgccaactcccagcctgccatttaaggtcccatatcctttcacaatcaatcagcctctgcgccaggtgccttgtgttcggggggataatgtccgctttagtttcgtgtcgccttgccggaatacagactttcctgccgtagcggggcaaatttcctgcacttagtcgcttattgattatactttgatggtggcttgtgctgcttcaggctgttgacgcgagggcgggtagcaaaaccagccccctgacattgggtcaacggggccgaggaacatgtgttcatgtaacagtcgtggaggtatggaaagatgggattattaaattttgtgaaagaagcgggcgagaaaatatgggatgccgtctccggcgacagtaaagaagatcgggccgataagctgaaaaaacatatcgatggacttaatctgcctggcgccgaaaaggtcaatattgatgttgcggaagatggcaccgcaacggtcactggtgatgtcgcttcgcaggaggataaggaaaaaattctggttgcggtcgggaatgtcactggcgtaggccaggtcagtgacggcgttaaggtgacgcaaagcggggcggaaagtcgtttttacacggtcaaatccggtgacactctgagcgcaatctcaaaagcgatgtatggctcggccaatgagtatcaacgcatttttgaagccaataaaccgatgctgacccatcccgacaaaatctatccgggtcaggtgctgattatcccggcgaagtaggccactcagcagcaacatcagtgatggcaggaatacttgctttataccgctgtcggaagccgccgcggacatctaatcctctatcaacggcaaaagagccagcaagctggctctttgttcccccgggttcaggcgcttactgtgcgtcagccagtgccagtcgggcctcttcctgctcggtgattttacgctgttgctcaagttccagcgcgccgcgatgagagaggtagcagaagagtatgcagcagacgatcccgcccatcagcagatagaacccgccgtgccagcccattttatcgaccattacgccgaacaggctggtgcctaacgatgcgccaaagatatagctcataaatccgcgcagacccacggctgaaccgacggcaaagctggggacgatttccatggtctggaccgaggccagaaactgcgggacataaataaggcagcccacaatcgccgcgaataccgtgaccatcagtagcgattcgcttttccagtagccgatcagacagatgaagattagcgtcatacagattatggctaacggcatccggcgccctttaaacagcttgtcggagagccagccggccagcagagtagacggaatcgccgcccactcaaaaaacaggaatgcgacgctcatttgttctttggaaaaatgtttcaccgtcagcaggtaaattggcagccagctgatcatgccgaaacgcaccatatagacaaacacatccacaaaggagacataccaggcgtttttgttacgcagtacgtaggtacagaagatctgaaatgcgctcatgttctccggcgctttctggccgtgtttggtcttcagcaccactttctcttccggcatcatctctgccagcgaaggcagaccttcctcgcgcggcgaacccttacccagcaccagtacgctaatggcgaataccaccgccacgcaggccggtacaatgtagctggcgctctgccagtgctcggtgccgagaatggcgaatgcggcgccgacgatcggggcgacaattccgccgccgacgttatgggaaatgttccagaacgcccctacgcggccacgctcacggcgcgggaaccagttcgcaatagtaataaaagaggggccgacccccataccctgaaacaggccgttcaggacaaccagcgcagcgaagacccagaatgcggtactgaatcctaacccgacgttgacgatggcgcacagcaccaggccacaggccataaagactttcgggctggctttatccgcgaggctgctcattacgcctttactgatcccgtaggcgatgagcatacagctgctgagcaaaccgatctgcgtggcgctgaggtctaactgttctttcagatagggcgtggataaggtgaagttattgcgcacgatatagtacgccaggtatcccagaaatacgcttagcagcgcctgcatacggtatcgaccataggttgcctgaattttctcagcaggaactttattcgccgacgggcctttttttaataatgataacatgtcgtcacctgtatttatattgatatgaacatcaggagtaattaccccgaagggtgaaataagcggctaaaaaattcaaatcgacgaaatgagtcaaaattgactcaaaataatgcagggacgggttgtttttgacgcatctggcatgagtgagattttgcgcaattaattttgcgctgattttatgtccggcttgtgcggacactaacaaattgcctaatcattatctggtaatctttcccgatattcccggacgcccgtttgactatttttccgctcgcggcgattaattcaccagatgtcataaacgggtaagttttgtctcaacgcggtttttacggtatttcaatatttatgaacgggatcacaaacatatttcttcgtggggtcaggatagtgagcaaaatgctcgcgctgctgctgctgaccgcatggctgagaccctgtgcggcgcaaggcaatgagctggtgatggcgacgacattttctcccagcgccaccgtgtggattatcgatcgctggcagaaagagccagggtcggtgatgataaggacgctcaaccgcaccagcgcctcgctggaacagttgcttgatacggcaaatgccgaaaatgtcgatctgatcctgacttcgtcgccgatgctgctgcagcatcttcaggagcatcaaaaactggcgccgttcagcggtgcgccggcagtaagccaacatcttgtgccggaatccattcgctccacctccgtggccgtggcgatctccgggttcggtttgctgatgaatcgcttggcactgatgacccggcatctgcctgcgccagcggactgggatgacctgaccgatccccgttatcagggggcgctgctgatgagcagtccgtcgcgttcggataccaaccatctgatggtggagtcgctgctgcaacaaaaaggctggattaaaggatgggaaacgctgttgacgacggcgggaaatctcgtgaccatttcatcccgcagctttggggtggcagataagattaaaagcggcctgggcgtggctggtccggtgattgataattacgccaatctgctgctgaacgatccgcacctggcttttacctatttccctcagtcggcggtttcgccgacctatgtcgcagtgcttaaaaacagccagcacgccagcgaagcgcggcggtttattcgctatctgttaagtccggagggccagacgatcctcgccgacgctaataccgggaagtatccggtaacaccgctggcgccaggcaatccacgggcggcgcagcaggcgatgctgatgaatcaaccgccattaaactatcgattgatcctcaaacgtcagcgtttggttcagcggatgtttgatacggcgattagctttcgtcttgcccagctcaaagacgcctggcgagcgctgcatagcgcggaggtccgtcttaagcgtccgctgcccgagatacgggcgctgctcacccgtgtcccggtggatccggccagcagcgaggatgaagcctggctggctcagttcgacaacaaaagttttgcggaacagcagatgatggagtggcagctctggcttctcaacaaccagcggcaggcgattactaaactggaagaactgaaatgacggacaggtccatgctgcaacgcctgcggcaaatcagtatcagtagcagtctgcgcggggcatttctgacaggggcgctgcttacgctgattgtcagcagcgtaagcctctattcctggcatgaacaaagttcgcagatccgctattcgctggatgagtattttccgcgcatccatgcggcttttctgattgaagggaatctcaacctggtggtcgatcagctcaatgaatttctgctggcgccaaataccacggtacgactgcagctgcgcaaccagattatccagcatctggacaaaatagaacggctaagtcaggggttgttgccggcagaacgccagcagttgggggtgatattgcaggacagccgcgcgctgctggcggaactggatcgcgtgctctacaacatgtttctggttcgtgaaaaggtgggagagcttgcggcgcggatcgactggctgcacgatgatttcaccaccgagctgaattcgctggtgcaggattttacctggcaacagggaacgctgctcgatcagattgaagcccgacagggggatgcgaggcagtatctgaaacgcgcccgggaagtgcagaatgaacagcagcaggtctataccctggctcgtattgaaaatcagatcgttgacgacctgcgcgacaggctcaatgaactgaaatccgggaatgatgacggcatgctggtggagacgcatatccgctatcttgaaaacctgaaaaaaacggcggatgaaaatatccgtgcgctggatgactggccgagcaccattaccctgcgacaaacgatagatgagctgctggaaattggcatggtaaaaaataatatgccggataccatgcgcgactatgttagcgcgcaaaaagcgctcgtggaagccagccggtccagagaagcgacgctggggcgcttcagaacgctgctggaagcccagcttggcagcagtcaccagcagatgcagatgtttaatcagcgtatggcgcagattgtccgggtcagcggcgggttaatcctggtggcgaccttgctggcgctgctgctggcatgggggctaaaccattattttattcgctcgcggctggtgaaacgctttaccgcgctgaatcaggcggtggtgcagattggtctgggccggaccgaggcgaccattccggtttacgggcgcgacgagctgggacgtattgccggtttgcttcgtcataccctaggtcagcttaatgcgcaaaaacagcagctggaacaggagattggcgagcgaaaagcgattgaggccgatctgcgcgccacgcaggacgagctgatccagaccgctaaactggcggtggtgggacagacgatgaccaccctggcgcatgagattaatcagccgctgaacgcgctgtcgatgtatctttttacggcgggaagggcgatcgaacagggacaggcggagcaggcgcggacgacgttaagcaaagcagaagggctgatcaaccgcattgacgcgattatccgctccctgcgccagtttacccgccgcgcagaactggaaacgccgctgcatccggtcgatttgcgtcagacgtttaccgtggcgtgggaactgctggcgatgcgtcataagcctcagcaggggacgctggtgataccggatgacactgtctggatcctgggggacgaagtgcgcgtccatcaggtgctggtgaacgtgctgtccaatgccctcgacgcctgcccgcacgccgcgcaaatcaccgtgagctggcaaatccagggcggaaggctgtgcgtgttgattgccgataacggccctggctggcctgcggccttactcccttcgctgttaaagccgttcactaccagtaaaaccgtggggctcggaatagggctttcgatatgtgtttcgctgatgacgcaaatggaaggggcgttgcgtctggcgtcgacgtttacacgcagtgcctgcgtggtgctggaattcaatttgacggatgtaaaagatgttgagtaataactgttcgattctgctgattgacgatgatgccgatgtgctggatgcctatacgcagctgcttgagcaggcggggtatcatgtcagtgcctgtaataatccgtttgatgcgcgggagcaggtgccgaaggactggcccggcatcgttttaagcgatgtctgcatgcccggctgctccggtatcgatttaatgacgttgtttcatcaggatgacgatctgctgccgattctgcttatcaccggtcacggcgatgtgccgatggcggtggaggcggtgaaaaaaggggcctgggatttcctgcaaaagccgatcgatccgggcaaactgctcacgctggtggacgccgcgctgcgtcagaggcaatcggttatcgcccgtcgccagtattgtcagcaaaaattacaggttgagcttattggccgcagccaatggacggttcggtatcgccagcgccttcagcagctggcagaaacggatattgcggtatggctttacggcgagccgggaaccggccgcatgaccggcgcgcgttacctgcaccagttaggacggcacgctgaaggtccgtttatcgcctgcgagctgactccggctaacgcccatacgcttaatgaactgatcgcccaggcccagggcgggacgctagtcttaagtcaccccgagcatctgactcacgagcaacagcatcagctggtacagctgcagagtcatgagaagcggccttttcgcctgattggtatcggtagcgcttcgctggtggagttggccgccagcagccagatagtggcggaactctattactgctttgcgatgacgcaaattggctgccagcctctgtcaaagcgacctgatgatatcgagccgctgtttcatcactatttgcaaaaaacctgtcaacggctgaatcatcccgtcccggaggtggatgctggtctgttgaagggaatgatgcgccgggtgtggccaaataacgttcgcgaactggcgaacgccgccgagctgtttgcagtaggggtattaccactcgcagaaacggttaatccgctgatgcacattggcgagccgacgccgctggatcagcgggttgaggacgtcgaacggcagatcatcaccgaagcgctgaatatccaccagggacgtattaatgaggtggcggagtatctgctgataccgcgtaaaaaactttatctcagaatgaagaagtatggtctgaataaagagcactacaaaggggtttagggcatcttgtcagacgatggttgaaaattatgaggacagatacagattataaatgccttcaagtcagcagaggcgatttatgttattgtgactgcttaaatttccttaaaaggtgtgactgttgaacatgcgaatattgactgtagttgattatgatgagatgtggccggctttatttgagaacgaacgtactctgttgcagatgacgcttggtaaagtgatatcccggattcatcatattggtagcacctcggtgcctggattatcagctaagccagtaatagatatattaatcgaagttgctaatcttgaagaactggacagtttgaatcaggcaatggagggtgtaggatatactgtgcgtggtgaaaacggcattttaaatcgtaggtactttacaaaaggtggaaatcagcgtagtcatcatatccatgcgtttgccaccggggatgctcaaatcataaaacacctggcattccgtgattaccttattaaacacaatgacgtagccattcagtacgctttaatgaaaaaaagcgcgatgttattatgtgaaaatgacagccaccgatacagcatttataaagcagatttcattcagaaacatcttcgtatggcgcttattgatgcgggtcacctgggctagccttcaaataaactacaacccatgttttttgtaatttttcacagcgttacctcttgtttatccattattagcaaacagcacgccttgcagactccctgcggcttcctgcaactgagcattctgaataagcgacggggcgataaagccgataacgcatcgttcagtatggaggcactatttcacaaccccagcggcctggcctcctgtatgaactcaatcagaaggcgaagcccggtcggcaattgccggcggcttgaataatagatatgaaaaccttcctccagtggggaccattccgtaagcaccagacggagccgtccatccttgacatagggtgcaacaagaggctccggaaaatacatcaggccagccccgcccaatacggccaccagacccgtttcggcatgattgaccgtcactgagcctggcactgtcatttggtatgtttcgccgtctcgcgcaagttcccagcgataaacccgatcgtcaccgagacgattgctgatgcagcgatggtgtaataaatcatccggatgttcaggcgttccgtagcgttccaggtaatcaggggaggccgcgataacccagcgaatatcggcagataaacgccgggcaaccatgtcctccgggacggtgccaccatagcggatgccggcatcgaagcccgcatcagtcacgtcaaccatacggttgctggccacaatatcgatttcaatatcgggatagcgatccataaaagcgggcatgaccggcgcaagcaaaagatttgccgcttcaacggctgcattgatgcggatacgtccggtaggggtattgcgataccggttaagcgattcaagcgcgccttctatggtatcgaaaggctgaagaacagactgaaccagttcctcaccagctgccgtaggggtgacgctcttggtcgtgcgattaagcaggcgaactccgagccgggtttccagtcccttcagggcatgactcagcgctgatgcactgacgcctaattcaattgccgcacggctgaagctgcgatgacgtgcaatcgccatgaaataaataagatcggcaacatcagctctgcttatttgcatacagaatagttttccttatgcggcgttaaaacccgaatgcgttgatgaagaaatgatatacaccttagaccgattagggctaatccattgctgaatttttttcacaagtccattcatgcacgtccactcactgtacacgttgtgcttcgttattcttgaaaatcatgcgctctggctggtaggccagggcggaacactcatctaacggagccgtttatgaactatacgcatcttggccgcaccggcctgaaagtcagccgcctttgtctcggaaccatgaattttggtgacgtcaccgacgagaagaccagcgcccgcattctggatgaggcgcttgaggcgggtatcaatttcattgatacagcagacgtgtatggcactgaacaatctcccgatatccagcaaggctcggggctgtccgaggaaataattggtcgctggcttcagcagggtggccgccgtgaacgcatcgttctggcgacaaaagtctatcagcctatgggaccgggcccgaacgatcgccggctttctgcgtatcatattcgcaaagcctgcgaggacagtttgcgacggcttaagaccgaccatattgacgtctatcagatgcatcacatcgatcgtcatacgccgtgggaagagatctggcaggccatggaactgcttgttcagcagggaaaggttctttatatcggtagcagcaatttcgcgggctgggacattgcgactgcgcagtcagtcgccacggcccgtcatttcctgggcctggtcgccgagcaaagtctttataatctgacagcccgcaccattgagctggagctcattcccgcatgccgccattttggcctggggttgatcccctggagcccgcttgccggagggctgcttggcggcgtactgaaaaagatggcaagcgggcgccgtgccaggcccgcgtttgcccgtctaatcgaacagtatcgtccgcagctggaagcctatgaaggattatgtaaggacctcggcgaaaccccttccgatgtggccctggcgtggctcctgcagaatcctgtcgttaccgctccactgattgggcctcgtacggtcgaacaactccagcaggcgcttcacgcaacgacagtcacgctatcagacgacaccatgagctgtctcgacgaaatctggcccggccccgggggagaagcgccccaggcttatgcctggtaatgaccaaattaatgaatcctttcttcgttatagggagttccagtttatgagcaagatgatgcatgaccagccttctgctgccgtacccgcttcccgggaccggcgcaattttctgatcgccggcgccggtctggctttggccgcaaccacccttggcaggagcagcgccgtgatggcgaaaccggctggtcaggacacgctgaacgccccttcggatgctgctcccgtccggaaggaaaccttaaccacgcgtaaactcggctcgctggaggtttccagcatgggactcgggtgcctgccgatggtgggttattacggcggaggtccgcgcgatcgtaaagccatggtttcgcttatccgggcagccttcgaacaaggtatcacgttctttgatactgccgaggtctacggcccccatctcagtgaagaatttgtcggggaagcactggcccctgttcgcgatcgtgtggtgattgccaccaagttcggcttcggcgtggaggaggggaagcccacttcccttaacagccatcctgaccatatccgccgcgccgtagaaggctcgctaaagcgtctgaaaacggaccacatcgatcttctttatcagcatcgccccgatccgaatgtgccgatcgaggatgtggcggaaaccgtgaaggcgttgatccaggagggtaaagtgaaacactggggactgtcggaagcgagtgccaggacaattcgccgcgcacatgcggtactccctgtgactgcggtgcagagtgagtatgccatgtggtggcgggaaccagagacgcgaatatttccaacgctcgaagagctgggtatcggtttcgtaccttactgcccgactgcccgcagcttccttgccggagcagtcaatccaagccagcggttcgacagcaccgatcggcggcataacctgccacgcttccagcccgatgccctggccaaaaacatggtgctgcttgaattcgcgcagtcgtgggcccgtcgcaaaaacaccactccggttcagttcgcgctggcctgggtgatggcgcagcggccctggattgtccctatcccgggtacgacgcaatatccgcacctgatagaaaacagcggtgcaccgcaagtccggttgacggacagcgagctacgcgaaatcgatgcggcgcttgccaaaatcccattgcagggcggtcgcgccgatccgtttaccgaaagtcagtttgataaaagttaatacctgctgtcacagggagactgcaggtgaagtctccctctgtattattgccggggataaatcacatgaatggactaaatcataacgcgcttacatgcagtgccgtccccataccgccctgggagcgttctcttcagaccgtggaggcccagccgtacttcagcgtttcacaggcgtcgctcgtgctcgaagggatcgtgttcgatcggaacaataacctgctgtttgttgatgtggcgacggggcgcgtgtttaagctaaccccggagcggcagctttccattgtccttaaggagaattcattcggtgcttccggcctggcggtacacaaagatggacggatctttatcgcctcggtgggcgatatgcagcgaggttctgtccgggctatcgaacccaacggcacccgtgagcagatgattgttgctcctgatgccggatttcttgtcaacgacctggtctttgataatcagggcggattttatttcactgacagtcggggaaattcagccgatccacagggtggggtgttctacgttagtcccaatgtcggggcaattcatgccatcctgcctggactcgcggtcgggaacggcatagcgattgaccccgctggctctcagatatgggccacagaacacgctaaaaacaggcttcatcgcgtaagactgtcagacgccaccacgatcgccccgtttggttcagttgttacctatcagttcaccgggccggcgccagacggggcccgtgtcgacagcgaaggcaatgtatatgtggccatctcaggccagggccgcgtcatggtcttcaaccgcaacggactgcctattgggcaaattgtgctgcctgaccgcgacaaaggccgtaaccttaaatcgacaagcctggcgatccgccccgggcatcgcgagttgtttattgtcgctaacagcgggaccgaacctggtggagcgatgatttttcgatcgggcgcattcgcgccggcaccgtttcccttttcacatcagtgaccgggaatgagtggtctgggagacccggcaacgccgggccagggcagggtgttaatagttctggatcgctgaaggtggcgtgagggaaggcggcgtatccggaagcgggggaatgatcccgtcaacggggtgcggcagatagcgagcttccagttccgtgatttcggcatcgctaagtgaaaagtccagcgcgctgatagccgtggaaagatgttctggtttcgttgcgccaatgatcggtgctgtgatgacggattttgataacagccaggcaattgcaacatgagctcttggcaccgcgtgcttttcggcaatgctggcaacaacatcaatcacgggcttatccagaagggctgcggtctcatacatttttaacgcaaaggcatcgttttgcgttcgtcgggacgtgacactccagtcgcgcgtgagcctgccgcgtgccatcggactccaggggatcaccccaacgccctggtcttcacacaggggcagcatctcgcgctcttcttcccggtaaagcaggttgtattgcggttgcatcgtgataaatcgggtccaaccgttacgctcagcggtatgctgcatttttgcaaagcgccaggcttccatagaagatgcgccgatataacgcgcttttcctgctttaacgacgtcatgcagagcctccatggtctcttcaacaggcgtggagtagtcaaagcgatgaatctgaaagagatccacataatccatgcctaagcgcatcaggctatcgtcaatagactgaaaaatggccttgcgggaaagaaacccggtattgggtgagttgcgccacggaaagaaggtctttgtcgctacaacgatctcgtcgcgtctggccatctctctcagcgcttttcctgtaatttcttctgaactaccgcccgagtagatattcgcggtatcaaaaaaattaatgccggcttcaagcgcctgacgaatgagcggtcgtgacgccttttcatccagggaccagggttgaggcaaacgttcaggttcgccataactcatacaaccgagacaaagacgggagactttcaacccgctacgacccagattcacatacttcattcggtgttccttcttttattgccagcaattatgtatgtgacagggtattgcactggtatgaagggaaccagcatgcgccattgaatggtgttatgagtttttttcacaagtagacaacattctcatacgcaagcctaggcccaaagtcggtatagcgttcgcggataatattgagtgcgtaccaggcaagaccatcaggcagctggttattgctgggttatccgcgacggcggttaggcatactcagtgggcctgattgattgtaacgcgagagaaggcgtcggcactggcgatcgggaatacccaggcgctgcgcggccatctgagaggtcagacgccggtcgacaacgtcatgaatgatttagagtcggttaacttcatccaaagtaaaaatgccggtgcatgatccgtcatcagaatcctttgattgggaaactatctttgaaagcagtgatcgctgtggtgagactgtagcgcggacatatctatttggtcagagacggacatctcaatttagctactacaacatgagtgcgcataatgtatattatgttaaatgcaatgtcgtactcaataacgtcatctttgatagctgcctcttcccacatcaacactatgaccgtcattcctttcatgcacgtgaatgctgcgctataaggcaaaatgttcgaggtgataaatcaagcatggcttttaacaatcacttcgcccactacagcctgttctcctacagtaaaagccagggaaattcattcagccacacctgctgcttgtactgtccggcatatcttactgctgttgcattttctgaccgaacgcgtcacgggatgccagatgaaatgctcatttgatagcgcgccgcctgcagtgtgtatcaaccgggcttgatcagccacagacgtgattatcaaaaagatgccagcttcgttttccgcactcaaatggcgagtgccatcgcgaccataaacagaaccgccagctgaagttgaatggtgtactgaagccctacgcagccggcttccatgttgacaggctctgcctcacctccccctttccttgtatctggtgattagctaccaccaggaagtacctggccacaacatatcgcaattccgttcatcgccgaaaaagcataaatgctctctcgggcatttatgcttttatatcgcggtcagaaagatttgttatgtttcatctatgaatgatactcgagccactattcatccagctgaactgcttatacttttacagatgaatacagcgacagtggcttagctttcacgctttgccatcatcaatgccagatcaacgagacgattagagaatccccattcattgtcgtaccacgccagaattttgaccatattaccgccaatcaccagcgttgatagaccgtcgataatcgacgagcgtgggtctccctggtaatcgctggagacgagcggttcatcgctataacccaggatccctttcagaggtcccgctgcggcggcttcgcgaaaagcattgttcacctcttcgaccgtcacatctcgctcaagcgtgacggtgaggtcaacaatggacaccactggcacagggacgcgtagcgagtatcccgttaaacgcccatccagctcaggaataactttacccagagccttcgctgcgccgctggagtaaggcacaatcgacaatgcggcggcgcgagccccgcgcagatctttttccggctgatcgtgcagcgcctggctgttggtgtaggcatgggtggtgttcatgagaccatgtttaataccgaaatgctggtgcaggacctgtgcagcaggtgcaagaccattggtggtgcagcttccgttgctgatcacgtagtgtttatccggggagtaaaggctctcattaacgcccatcacaatggttaaatcatcgtttttacccggggcagagataatcacgcgcttggcgccaccgctgtggatatgtacagcagccttttcacggtccgtgaataatcctgtagcctcaataacgatgtcgacttcacactgacgccacggaatactggccgggttgcgttcactgaatacggtaatgggtttaccatcaacaacaagccccccttcacccgcggtgacctctgcatccagcttaccgagaagcgagtcgtatttcagcagatgcgccagcgttttgctgtccgtcaaatcgttgattgccacaatttgaatatccggattattcagtgctgcgcgcagtacattgcgtccgatccggccaaaaccgttaataccgacctttaccataattaactccttatcgattatcgctggagtcagagtaggacggacgggttatggcgtaaatgacaaaaaaggatcactttacgccattttgcgacagtgaaatcgttgacgatattcacctggagtgaggttaagctgtttctcaaacaagcgtcgcaggttaatactgctgccaaatcccgtttgctcggcgatacgatccagcgtctcgtgagtctgctccaaacgctgccgcgcggcggccaggcgggcttccgcgacgtaccgcgctggcgaagcgccggtttcccgggtaaagacgcgggtgaaatttcgcggactcatggcgactttttccgccagcttatctacgctgaggtcggcggtgaggttttcgagcaaccacgccagcagatcgttaatcgggccctgggtggcggtctgctgaaggttatagcggctaaactgcagctggcctcccgggcgacgcagatacatgacgaagtcctgggcgatatcgcgcgccaggctgaagccatagtcttcttcaaccagcgccagcgtaagatcaaagccggaactgaccccgccagaggtccagatatgttcgtcctgaatatagagcggcccgccctcgacgcggatctgcgggaattccgcctgcatggtttccagcagcttccagtgggtagtggcccgtctgccgtccagcagtccggtttgcgccagcagcatcgcaccgccgcaaatggagactatgcggcgggcatggggagcggcaaggcgcaaccagtcaaccaccgccatcccctcctgcgggttttgacctctgccggtaatcatgatggtatcgaggggctcgcgagggtcaatctcatgcagacgatggtcggccagcagatttaaacctgactgaccatggataacctgatgcggttgagttgtcgctagcttgacctggtagcagatttcccgggcaccttccgggtgcaggcggttggcctgcatcagaatgtcagcaataccggcggattcaaacagcatgccgccatcgggtacaataataagtatctttttcatgtcctgaaaagtaatctttttacagaataagtcaacaaaaggatgtaaaaacctgaaggctcggaaagagtggtttcatacgtgccttcagtttcagggagatgaacgttaaacaggtagattttgcctcacagtacaggcagcatcactttgacaggacatcacgaaggtagaatctcaatcgtggctgccctggcgcgtatccctgtcattgcggaaacatagctgctgccggagtactttttcaggtaagcctgatcaattttactttcaagctcagggtccgagggttttgcgaacagtacgtcgaattcctgtccgatagccagtatcttacctgcctgctgggacaatgcagcctgataccattttgaacggataccactataggctcggacgaaaagtcggttgtccaccttcacttcccatatccatgtcggcgtaccggtcgtattcatatcgggatgatacggtgcgattttcaggtcgtcggccgcatctattcttgttaatacttcagggttccagtacatatacctctcctctttcatatgcggttgcttttttctgtcgcaggattaactcgataatattcggaaattaatatcgcatcaggaattagtgccagctttatcagtaacaatagaatacccaacaccccatgctaagagagcagtatctgtcgtttgtcccacagacactgcatctgaaaacaccggacggtgctatggcttatttattaagatttttgttgaaaaatgcagtgatgttatcgaacgggatcttgtccatactatcatataaatcaacatgggtagcattttttacaatcagcagctcttttggctgatttgccgcttcataagccgttttggagaagtaaagcgaatgcgccttttcaccatggatgaacaggatcgggcgcggagaaatttccttaatataggtcatgagcgggaaattcataaaggccatcggcgttgtcacggaccatgaattgccagagttgacggctcggggatgatagccgcgtttagtcatgtagtagtccgcatagtccacgaggaactgtgcttcaccgcccttcagtttattataggctggctggtatgccggtttgccgtttgctgcatcttcccagcgttgaagactcatcttctccagcgcctgctcgcgttgctccggtgttacgctgtcattgtagccttttgacattacgcggctcatatcatacatggtgctggcaacgaccgcttttacgcgcttatccacggcaacagcgttcagggcaatcccccccatgccgcagatgccgatgacaccgatacgttcacgatccacataaggttgtagtcccataaaatcgactgcagccataaagtcttcggtattgatatcgggtgaagcaatattgcggggttcaccactgctttcaccggtataagacggatcaaatgccagcgtcacgaatccgcgctctgctaaagtctgagcatagagacccgaggcctgctcttttaccgcgccaaaaggcccggaaataacaagcgcagcaagcttcttgttcccgcgatcttttggaagatacacatctgcggccagcgtaatgccgtaacggtttttaaaagtaactttttgatgatccactttttcgctccttgggaaagttttatcccacgtctgaaccagacggcctgaagaatctgctgtgcctggtgcaggctgggccaccgcaacttctgttgaaatcagagccatcgccccggcaaggagtgcgccattaaaaaagcgcgtcgaagatattagcgtcatgatattaaaacctttcattggatattgagggacctatttcagacaacatgcatgagtatttcagttacaactttcggccggtaatcactggcgataccaaacgctttgacattgatctggacgttctcaacgatagcgggcagatctgcttccttgatgttcagctgttcaagacgtgttggcgtaccaatttcttcaaaccacttctcaagcgcagcgatgccgtcgtggcagttaaaaaatggcttaaacctgaacgggttaaatttgctcgcggtgaaccctgatttcaggacactgcctcatttcagagttattattttgaatgtctttaatataaggtgttattaaaatactctgcattatttgcctgatcctctgaacctaatctcaaagcgtgtatttcagttttcatagctgctaagttgataacctcaaaagaggtcaaaagtgtggggcattacagaatgattcctaacaaatcggttgaaatactgctgggtgagctatcgagggatattgcacagcgcacacccggcaccggcgatttccctaccgccgtagaagggctcgaattgtttcgccgaaacgaacccgctcccccggtaagctgcctggtccctcccagtatcgttctggtggccgatggcgcgaagatcatgtgggttgggggtgaaccttatgaatataatgcggaaaaattcctgataacctctcttgacctgccggccagttcggaaatattgcaggcttcgacatcccagccctgcgtcggcgtagcctataagcttgaccagcgcgtgctaatggaattaattgcccagggaagcctgccgccggtcaaaaaacgagacgcgggaacgagtgtcgggataggtactattaccgatgctttgctggagcctttctgccgtctgctttctttgcttgacgaacctgaagccattcctgttctcgggccgctgatccaaagagagatacactaccggcttttgatgagcgatcagtccgatcatctcagacagattgcagcagtcgacggccatggctaccgtatcggtaaagctatcgactggttaaagaccaatattgcatcacctttacgcgtcgaggaactggcaagtcgggtgcaaatgagcacgccctctttccaccaccatttcaggcagcttgcggggatgagcccgctacggtatcagaaatggctgcgcctcaatgaagccaggcgactgatgctgaatgaacattacgatgtcaccacagcagcctatgcggtcggttacgaaagcctgtcccatttcagccgggaatatacgcggatgttcggggaatcgcccaagagggatattactgaactgagaaagtcagcgggtaagctttaatcaattctggaccgcctgtaccatgcctggtcttcgatatcccccggcacgtgagtcgaatacccggaactttatccccgccctgagggacggggttttacgacgcgctggttagtgacaacgtcacagcagcgcactaaagatgctcctcttcatccagagagatcacctgaatgccagcattacgatacgcctgaacgtcatcaggcagacgatccaccactacggtgtcaatgcgatctgctgcggtaaattgggcaagcgaggtgttattcagcttgctgtagtcacagacaataattacctgactggcgtgttccaccatgcctcgtttcgtttctgccagcatgatatcggccacgcaggcgccgtgtttcagcgacagcgaattggtgcccataaatgctttatcgacgtttagcgtgtcgagaatggaacgtccgttgatcgccaccacgcagtggtatcccttcttaacgatccccccgagcagaatcgtttgaatcgaggcgctggcctcaagctcccgggcgatttggtaatcattggtgaccaccgtgacgttctgtctgtcgcgaatattacgcgcaatatgcagcgtcgtggtaccggtatccagcacgataatgtcgccatcctcaaccagcgccgccgcgcgctggccgatccgctctttcgcgctgagattgacaatttcgcgatcgtccgacgcctgttcaaagcttgcccgggtacgaagaacggctccgccgtgggttcgggtcagcagcccctcctcttccagctggcggagatcggcacgaatggtggcgcccgatacattaaagacgtcacacatctcagaaacagcaactttgcgtttttccctgagaataccgagtaacttctcctgtctttcttctgcaaacattctgcctctctcttttttacggcacgttacggcttacctttgcgtatcagtcgggccccacgctgagcgcatccagcctgtcgtataaggcggcggattgccggtacagcgtatcaaaaagctcgctacaggcgtggtaataatcccgcagacggggatccggtgagatcactttgtcgaactgcaccgtttgccgcacgccgctggcaaaatcggcgtacaaccctacgccaaccccggcgataataccgcatccggtgacgccattctcctgattacgcgtagataatatcggcagattgtacgccgcggctttgatttcaagccacagcgggctgcgcgcgccgccgccggaagcgatcatttgttgcggatactgcccgcacttctgcagctgccgaagattgcgccaggatgcaaaggccaccccttccagaactgcgcggaataaatgaccgcggcgatgcttgcgctgcaggccaaaaaactgtgcccgcgagttcgtgtgttcggccagacgttctcccgtcagatagggaagaaacagcagcccttctgcccccgccggcaccgccgccgcttcctgtaaaagctgtggatgcgtaatctggttatcggcaagtgccagccgcgcccagcgaacggcatcgccgccggcgtcgaggatcgtaaatccgccccaggccgcgttggcaagatgaagattattaaccagcggatggtgtaacggccgcggcgacaccaccgtcatcagcgtcgacgtgccggttgaatcagacgccatccccggttcatacacacccgagcccagcagagaggccgccatatccgacgtcccggcaaccaccgggatacccgccggcaggcccgtcaggtcggctgcgcgctgcgtcacctggccgattatgtcgctggaaagtttaagctccgggagctgatcgacccgcagaccaaacgtttcgcaggcttgcgatgaccagctacgggtttcgctgtccatcagaaaatagcaggatgcctcgctatagtcggtcgccatagcgccggtcagcatgaaattaatatagtccttcggcatcaatactttagcaagctgcggccagcgctccggatgatgttcacgccaccagactaatttgaaagcgggccaggctgccgcgggcggattatttaaatgcgccagccacttttcccgcccttcgcgcgcgataaaggcatccacctgcggctggctgcgcttatcattccataacagcgccctgtcctccaccagctcaccctgctcgtccagcaggacggtgccgtgcatttgcccgcaggcgccaataaccgcaatctgcgctgccgtttctggatagcgataaagcacctcgcgtatacagtcgcaggcggcctgccaccataaagacggagcctgttctgaccatcccgcacagggcgtggtttgctcatactctctttgcgcaaagccgatcatcgcgccgtcaatgcgcacaatagcggcgcgggtactgccagtgccaacatcaatcgtgagtattttatctttcatcactaactccggtgacgtcttaaggcgggccaccaggcccgcggtctctcagtttaatcggcgttcagctcgggaaaacgttccgggtgctgctccagttcagccagcaccttggttaccgcgccatggctcatgccaaagcggcgcacgccaagctggtacagcgcacgcaccgtggccagatcgcgaatgcccccggcgcctttgatatcgattcggcctttaagctggtcggcgatgatgctgactttttccaccgtggcgccggtgggcgcccagccggtagaggttttgacccacttcatccccacctctacggcaatttcgcacacgcgacgaatctgctcctcattaagatagtgcgtttcaaggatcactttggccggtaccggggcggcggcttccaccacgcggcgcaaatcttcgcgcacatagtcataatcgccggagagcactttgccgatattcacgaccatatccacttcccgagcgccgtcggcaatcagctgccgcacttcctgaaccttggtatcggtggtatgcccaccgccgggaaagccgaccggaccgccaatcatcacctctcccgtaccctgctgcggcagcaacgtactgagaaagcgcgtccagcaaggcagtacgtggacggaaataatgttgtatctggcagccagctcggcgcaggcgcgaacatccgcttcggtactggtggcctgaactgcgctcagatcaactaaacgtgcaaaacgacgggttgtttcattcatggtcttatcctgtcctttgtttttaattgctttcatttaatgctgatatttggcttaaatccatttaaaaacgcattaaatgaaaataacgtgatcaaattagcatttttttattttcatttgtttttaattagcagcaggaaataagcgttaaccttgcagagcaggcgtaatcggtcataaatgggcgcaaaagcaatcttgcatttatttttgtttgtttttgtttatgcctgaatcacgggcgaaatagcgcaaaccgctgacggaagtgaagcgaaatgcgtgcgctatcacagtgttcggctgcggatagcttgtcttcgtgggacattcccgaggtctcaacgctctgcgcaagggaaaggtaatctgattatgtacttcaggagagagctatgttgccgctggaacgtcatcgtttgattgttgaactgctgggccaacacggcgtcatgcgggtgaatgagattgcgcaagcgactcgggtctccagggaaacgattcgccgcgatctgagcgagctggaacgcaaagggatcttaacccgaagccacggtggagcgctggcggcggaaaatccgctgccggcgacccgggcggcggcatccgccctgccagttgaagatagccagggaagctttcagcacagaacgctgctgcacagcgaaggcaaaatgcgcgtggcccgtaaagcactgcagtttctccaaccgggacagaccattgtcctggacgggagtagcaccagctggtttttggcccggcagatgccggagatggcgttgacggtgattacgccctccattcgcatcttacaaactctgatgagccgacgctcgttgcatctcgtcgggctggggggcgatttctccccgaccgaagagtcgttcttcggggaaaccgcctcacgaacgctacgcgaatatgccattgatacgctctttttctcctgccaggggctggagcgcgatagcggcttgtatgcgggtacgcaagcccacgccgccctgctgaaacagatgctgctggccgcccgtcagactgtggctttggtcgacggcagcaagctggggcgaacaggcgtcgcgcgtatcggcggactgggcgagctggactgtctggtgactgaaaggtttgtcgatccgctgctggaaaaagagatgacctggcataacgtcagcctgcaaatcgcctgagtacgccgtcatgacgtgacggttaatacgcgcaatgtcgaaacgctgcttaccgcggcagggccagactttgcctgaattcagccaccaccggaataaatgaggccttatgcgttattacctttctccctcgctgatgtgtatggacatgatgaagctgacggaacagctgcgctttctaaacagcaaagccgacaggctgcatgtcgacatcatggacggccactatgtcaaaaatctggcgttgtcggccagctttgtggcgcagatccgtccctacacctcgcttcctatcgatgtccatctgatggtcgaagcgcccgcttcgtttataccggcgctgttagacgccggcgcagacgccttctcactgcatccggagaccatctgccgcgaagcgttccgggttatcaatatgcttcgtcaggcggggaaagaggtgggaatggtgctcaatcccgccacaccggttgagagcatccagcactatctgcatctgctcgataaggtgacggtgatgaccgtcgacccaggctatgccggtcagccgtttattcctgaaatgctcgccaaaattacgcagcttcatcagctcaaagagaccggcagcctccgcttcttgctggaagtcgatggctcctgtaaccgcaacacctaccgcgcgctgctgggcgccggcgcacagatattagtgatgggcagcagcggtttattccgcgctgatatgccgctcgagctggcctgggaaaccatgtcccgcgaactgtccgccgcgctgcactcccccgagctggtatagaggagcgaatgatgtcaggaaaagtctgtgtttttggttcattcaatttcgacatggtcgccagggtggatcgctttccggtaccaggtgagtcgttagtggcctgcggaagtatgaccagcgccggaggtaaaggggcgaaccaggccaccgccgcgctaaaagcgggagcaaatgtccactatatcggcaagattggcaatgacaccttcggccattttgcccgccgtcatctgaaaggcgtgggcttcaatgctgtgacgctgctggtcgccgaagagatccccaccggcaatgcgctgatttatgtcgccggtaacgatgccgaaaacatgattgccgtcgatcccggcgcgaatatgacggtgaccgatgatgaaatcgccggctgcattcccgctatcggctgcgcggatgtggttctggttcagctggagaacaatctttctgctattgaacaggtcatagacgccggaaaacaagccggggccttggtaatactcaatcccgcgccctggcagcccgttgagcacgccgttctaagcaaagtggatttacttacaccgaacgccacggaggccgggttaatgaccggacgccgggttgacagtctgacggccgcggctgaggccgccgacgtgttacatgctcagggcgcgcgcaacgtcattatcactctcggcgccagcggcgccctgctgagcgagcatggggtgaaatcccctattccctgctttccttctcacccccgagacactaccggtgcgggcgatgccttcaacggcgcgctggcggcgcggctggcctgcggggaaccgctacaggccgcagcccgattcgcggcggcctatgccgccgtcagtgtcgaaaagcaaggcgcctcatctttacctgagtacctggaggcacaggaacggcttctccgtgccgccgctgattatgaaatggcataaaccctactgtataaaaaacattaagaggatagctcaatgagtacgctaatcacggataaggtcgagaacgcagcggtccaaaaagaaaaactggacaccagtgcgtatttaccccataccccctggctgcaatttttactggtctgttgcctgtttgcgctatgggggatggcgggcaacctgaatgatattttgatcgcccagtttaaaaagggcttcgatttaacggatacccagacagcgctggtgcagtcgatttttttcctcggctacttttttgtcgccctgcccgcggcggcgctgattaagcgtttttcctataaagcggcgattattattgggctgtgcctgtacgccctcggctgcttcctgttcgttccggccgcacagatcatgacctacggcgcattcctcgccagcctcggagtgatcgcctgcggactctcttttctggaaacgtcggcaaacacctactccagcctgctgggtccgattcaatcctccacccagcgtattaacttttcgcagatcttcaactcgctgggcgtgatctccggcgtattaattggccagctgatggtctttggcgaaaacgatccgagtcatgaacaactgctggcgatgcccgccgccgctgcagacgttgcacgccatcagatggttggtcaggtggtcgggccctatctgattatcggctccgtactggtggtgctggcgctggtgttcgtgtttattaaattcccgtcgtgcaagggcgcgcccgctcaacaacagcaactcccgacggaaagcatggggccaacgctgaaacgcctgtttgctatcccgcgctttcgcctcgggatcctgtcgcagtttttgtacgtcggcgcccaggttggcgtatggagcttcacgattcgctttgtgcagctcgtgcagcaaggcaccagcgagcacaccgcgacttactggctgctggcttctctggtgatttacgccgtgggaaaaaccgtggccacctggttgatgaaccgtctgaatccggcgatgctgctcggaacgtttgccctggccgccaccgccctgttactgattgccgttttcagcggttcaatgctggcggtctatgcgctcattctggtcagcttctgtatggcgccatgctggccgacgaactttggtctggtgatcaaagggatggggaaagatacccagaccgcaggctcgatcgtggtgatgtcgattatcggcggggccgtaattcctctggtgatgggcattatctcggatatgaacggcggcaatatgcaaatcgcctttatcgctccgctcctgtgctttgtgtatgtcgctttctacggcttctggtgcgtgcgtaagggggtataacatgcgcgaacttatcaacacgattgctcatattggctatcaggtcagtgacttaacgcgttcgcttgccttctatgaaccgctgggctttcagcgccagcagcggtttagcaagccatcgccacagggcactattgaagttgcgttcctggaaatggcgggcgccgtcctcgagctgtatcagcttcccgctggaacgccctttgacgcccctcgctgcggtatcgatcatctggcgctggaagtcagcgacctggatgcggtgcagcagcggctggcggcgctcggttatccgctcgatgaagggccgatagaagaagacaacgtgcgcttcctgcttattcgcggccccgatggcgaacggctcgagttcgatgcctgtaaacgctaagcggcagggctgaccccttcactcttttaggcccggttaacacgggtctaaaagatagcgtcctctggcattattcacgtcggtttgattcgcggatatctctcccccacccggtctctcctgcccattgtgcaatgttacaaaattgcttctgttttgttgattttctattgtgagccattcggcaatttcctctcctgaatttccccagactactcctactcaatacgcgatatcaggagagacacatgaacagcacctccgccgacttccagaatctgtaccaggccctgagccgcagcgccgcccgcagcccggatgccctggcgctggcgtttgaggatcggcgctatctgtaccgcgattttcatctgcgggtacagcgggcgatggcgcagcttgatcgcggctggtcgctgcgcaaaggcgaccgtattctgctggcctggggcaatcaccccgctttttgcgaagtcctttttgccgcgctgggtttgggcatcgaagtggtgcctttcagcaccaagcttaagcaggccgaaagcgaggcgctggtaggccatatcgctccccgggttgtcctgttcgatgcgaccgtgcaggactggctgaaaaacacccccgacgcgcgtgcggtttcactcagcgaatggcaggcgctctgccttcccgaaccgctgacccgcccgccggtcccggttaaccgcgacgatacggcggtgatgatgttcacctccggcaccaccggagagcctaaaggggcgattatcacccacaataacctgctctgcgcgattgacgcctatacgcaaaaactgaatctcaccgccgcggatagcaccattctggcggtgcctatctatcacatcaccggcctgtcggcgctgctggcgctgtttattagcctcggcgcgagcatctggctgcagcatcggttcaatgccccgcaggtgatcaccaccctgcgcgagcagaacattacctttctgcacggctcgcccaccatttttatccttctttgtcaggctgcgcgtgagcagagcgccagccatcccggcgattttccggcattgcgcacgattgcctgcggcgctggccacctgagcgatggactgatcaaggagttaaaaaccctgttcccgcataccgcgattcagccaatctacggcctcaccgaaacgacctcgcctgcgacgatttttccgggcgacgtctggggcagcgataaatgcggcagttcaggtcaggcgatcccgggtctcgccattaccatccgcaacgatcgccagcagcccctccccgccggacaaatcggccatatctggctaaaaggcgatgtggtgatccgcgaatactggcagcacagcgagcgacgcccgagctgcgatgcgcagggctggttttgtaccggcgatctgggctatctcgacgacgaaggctggctgtacatcaaagaccgcagcaaggacatgatcaatcgcggcggcgagaaaatttactcactggagctggaaaacattctctctacctatcggggagtacgggaagttgccgtcatcccgacccccagcccggtctacggcgaagagcccgtggcgtttatcgtgccggatggccagcatcacctgaccagcgaagagatcctcgactggctgaaggtcaaaatcgcccgttttaagctaccggcgcgcattattttcacccgtgctttaccgcgtacccacaacggcaaagtgagtaaacagcagctcaaaacgcgtctcgcagaatccatcatcacgctatcaacggaggataaaaagtgagcagcaaatttatcgacgcccatgaggcggcgcggtgggtcgccagcggcgacaccgtctgcaccgtcgggatgacgcttatcggcgcggcggagtccattttaagcgccatcgaagcgcgctttctgaccgcgggcgaaccgcgtgacctgacgctactgcatgccgcggggcaaagcgatcgccagcgcggtatccagcactttgcccatccgggtatggtgacccgccttatcggttcgcactggggcctggcgccgcgctggatggcgatgatcaacaacaacgaagtggaagcctggtgcctgccgcaggggcagatcgttcatctctatagcgcgatggccgccggactgccggggcggctttctcccgtcggtctcggtacctttgtcgatccgcgcatagagggcggaaggatgaacgcccgcacccgcgaacgacccaatctgatcgagcacgtcacgtttcgcggcgacgaatatctgttttatccggctcttcctctggacgtggtcattgtgcgcggcacccatgctgatgaagacggcaacctcacgaccgatgaagaggtgatgaagctggaagtcctgcacgccgttctcgccgccagacgctacggggcgaaggtgctggcgcaggtgaaatatcgcgtagcgaaaggctcgctgcatccgaaaagcatcaccgttcccggcaacctgatcgacgccattgtggtgtgcgaagagccgcagacggatcaccgccagacttcaagctgggccttcgacccagcgctgtgcggcgatatccagctgcccgccgcgcaaaatgcgccgctgccgctggacctgcgcaagcttatcgggcggattgcctgccgctatctgacccccggctgcgtcatcaatctcggcaccggtatacccaatgacgtgattggcgccatcattcatgaggaacagctcggcgagcaggtcaccatcaccgtcgagtcagggatctacggcgggcagcaggcgggtggcgtggatttcggtatcggccgtaatctgagcgcgatgattagccaccaggatcaaatgctctactacaacggcgcaggggtcgacatcacctttatgggcgccggcgagatggacccgcacgggcacgtcaatgccacacggctcggcgcatcctgccccggcgcgggcggttttatcgatatcacccagaatgcccgccacgtcgtgttctgctcctcttttaccgccaaggggctggagatcgcctgtgaacacggggcgctgcatatccgccgcgaaggcgaagtgcgtaaattcgtcgccggggtaaaccagatttcttacaacggcgaactggcccgcgccaaaggacaaaccatgcattacgtcaccgaacgggcggttttcgaactgcgcccggaaggaccggtgctgacggaaatcgcccccggtatcgatcttgagcgcgacatcctggcgcatatggattttcatccggcgatcgccgcggatcttcaggttatggacagccgattgttcgccccgccgccctgcggtctcgcggaacatctgtcccggaattcatcctctgactcataaggaacgttgctatgaaacttgccagtaaaaccgccattgtcaccggcgccgcacgcggtatcggctttggcattgcccaggtgcttgcgcgggaaggcgcgcgagtgattatcgccgatcgtgatgcacacggcgaagccgccgccgcttccctgcgcgaatcgggcgcacaggcgctgtttatcagctgcaatatcgctgaaaaaacgcaggtcgaagccctgttttcccaggccgaagaggcgtttggcccggtagacattctggtgaataacgccggaatcaaccgcgacgccatgctgcacaaattaacggaagcggactgggacacggttatcgacattaacctgaaaggcactttcctctgtatgcagcaggccgctatccgcatgcgcgagcgcggcgcgggccgcattatcaatatcgcttccgccagctggcttggcaacgtcgggcaaaccaactattcggcgtcaaaagccggcgtggtgggaatgaccaaaaccgcctgccgcgaactggcgaaaaaaggtgtcacggtgaatgccatctgcccgggctttatcgacaccgacatgacgcgcggcgtaccggaaaacgtctggcaaatcatgatcagcaaaattcccgcgggttacgccggcgaggcgaaagacgtcggcgagtgtgtggcgtttctggcgtccgatggcgcgcgctatatcaatggtgaagtgattaacgtcggcggcggcatggtgctgtaaggagaaaaacaatgacccaggctaatgatattgtgattgtcagcggcgtccgtaccgctattggcacgtttaacggcagtcttaaacatacccatcagcatgaccttggggccgccgtcattcgcgaagcgatcgcccgcgccgggattgcgccgcaggatatcgacgaaacgatcgtcggcaacgtcgggcaaatcgccgaaagcggttttatcgcccgcatctgtcagctgcgcgcggggatcccgcaggagagcaccgcctattccgttaaccgccagtgcggctccggacttcaggccctggcggacggcatgatgcagctgcaaagcggccaggccgaggtggtcgtcgcctgcggcactgaaaatatgacccagctgccctactacctgcgtaaagcgcgcgatggctatcgcatgggccacggcgagctggaagatggcctgatctccattctcacctggccggaaggcccttatcacaacggcatcaccgcggaaaacgtcgcgcaacgcttcggtattacccgcgaagcgatggacgattttgcctggtcgagccagcagaaggcgctgaaggcgatcgcggagggtcgctttcgcgagcagatcctggcccttgaggtgccggacggcaaaaaagcgacccgcctgtttgcgaccgatgaacacccgcgcgacaccccgcgtgaaaagctcgccacgctgcgtccggcgtttaaagccgacggcgtggtgacggcggccaactcatcgggcattaacgacggcgcggcggcgctggtgatgatgacccgccagcaggcggaaaaacgcggcttaaccccgcgcatgcgcattcgcggctgggcggtcgccggctgcggagcggagattatggggtttggtccctctcccgctacccgacgcctgatggaccgtctcaatatagttgtgcagtccattgatttaattgaactcaacgaggccttcgccgctcaggcgctggcggtgatgaacgatctgcgtctcgacccggcccgcgttaacgtcaacggcggggcgatcgccctcggccacccggtaggcgccagcggtgcgattctgccggtcaaactgatgtatgaaatggcgcgcagcggcgcacgcactggtctggtcaccatgtgcatcggcggcggccaggggatttctatgctgttcgagcgcgaaggcgcttagcaaaagacggcccgaagtggggcttcgggccgggcgtcgttcgggtcagcacccggcgacaacctgtgagctgacgaacgggatcgtctcgatcccggcaaggcttctgaccacgaatacggggaaataataaccatgtccgcaataaatgaaaaggcggtaaacgggacgcagttgcaacgcacccataaaaaaatctaccgccatttgatgccgctgcttatcgtggcgtacatcatcagctttattgatcgtaccaatattggcatggcgaaagcgaccatgtcggtggatatcggcctttccgcaaccgcattcggcctcggggccgggttgttttttctcacctacgcagtgctggagatccccagtaacctgtttctcacccggattggcgcacggcgctggatagctcgcatcatgattacctggggcatcctctcctgcggtatggcgtttgtcaccgggcctacatccttttacgtgatgcgccttctgctcggcgccgccgaagcgggactctatccgggcattatttactacctcaccctctggtttggccgcgaagagcgcgcaaaagccaccggcctgttcctgctgggggtctgtctggccaatattatcggcgcgccgctgggcggattgttattaagccttgatggcatgtccggctggcacggctggcagtggatgttctttatcgaagggctgcctgcgatagcgctggcgttcgtcgtctggcgcagactgccggataaaccagccgacgcccgctggctggacagcgacgatgcgcaagccattaacgcggtactggcgaaagaagccgaggaaacgcgccatacgccgagccgtttctccctgaaaaccgcgctgtccacccgagtgtttttgttgctggtgctgatttactttacccaccagttttcggtttacggcctgagttatttcctgccggggatcatcggtagctggggccagcttactccgctgcagattggtctgctgaccgccatcccgtggattgccgccgccgcgggtgggatcctgctgccgcgattcgcccgcacggaacagcgttcccgcagcatgctgatggccggatatctggtcatggcgaccggcatggcgattggcgccattgccggccacggtgtggcgctgcttggcttctcgctggccgctttcatgttcttcgctatgcaatccatcatctttaactggctcccgtccatcatgagcgggcatatgctggcgggcagcttcggcctgctcaactgcctcgggctgtgcgggggctttctcgggccgtttattctcggcgcgtttgaggaccgcaccggtgcggcaacgtccggcttatggttcgctgtcgcgctactgattatcggcgcgctggtgtccctgtttctcaaaagttcctcatccccaggctccgtatcggcgaaacaggcccacggcgaaaaagtgtaatcaggaggccattatgcgcattgaagtgttactggatttaaaaacccgactcggcgaaagcccggtctgggatgtcgaacagcagcgtctttggtgggtggacagcctcgacgggcgcctgttcgcctgcaacgcgcagggcggcgcgatcaagagctgggacgtgcgacagaaaattggctctttcgccctgcgccagagcggcgaaggcgcggtggtggcgctgcagaatggcgttcatctgctcgacttcgccagcggcgagctgacgctgttgcaccatccggaagcggaccgaccctttaaccggctcaacgacggcaaagtcgatcgtcagggacgctttctgttcgggtcaatggatatgcgcgaagaggaaccgagcggcgcgctatatcgcctggaccccgatctgtccctgcacgtgctgaagaaagacattatcgtctctaacgccccctgctggagcccctccggcgagaccttctattttgccgatacctggacgggcgaaatctgcgcctgggactacaacaccgcgaccggcgatctttccggcgaacgggtcttttgccatgtcgatcgcagcgaaggcggcgcggcggacggcgccaccgtggacagcgaaggctatctgtggaacgcgctggtctacgcgggcaagctggtgcgctataccccggagggcaaggtcgatcgcatcattgagatgccggtgaaaaaagtgaccagcgtgatgttcggcggcgaaaaccttgatgtgctgtacgtcacctccatggcgcagccgcccctgccgcgcttcccggaagataatcagctgcgcggcagcctgttcgccatttacgacctgggcgtgaccggcgtagcggaacggcgcttcgccggctaaacgaaccaccggctcgccgcgataacaataatacccggcgaactgactctgaccctgacaccaggcggcgcgcatcatgctgtcgcgacgccgcggagtaaacacgactatgacaacaatcaatcacacacctgccggtgaacaacgtggcaaaaagcggctgatacatcgcttctcctgggtttcgctactggtttgctggctaatctgggtgcttaacgcctacgatcgcgagatgatcctgcgccttggcccggtcatctctaaggagttctcgctctcgccggaacagtggggcaatatcgtcgccctgatcatggtagcccttgcggtgctggatattcccggctccatctggagcgatcgctacgggtctggctggaaacgagcccgctttcaggtaccgctggtgctgggctataccgcgctgtcttttatttccgggataaaagcgatcagccacgggctgacggcctttgtgctgctgcgcgtgggcgtcaaccttggggccggctggggcgaacccgtcggcgtcagcaacaccgcggagtggtggccgaaagagaagcgcggttttgcgctgggggtgcatcataccggctatccgattggcgcgctgctgagcggcgtggtggcaagcctggtgcttgccacgtttggcgaaggcagctggcgctactgcttcctgctggcgctgctcgtcgccatcccgctaatgatcttctgggcaaaatattctaccgccgaccgcatcaacacgctttatcagcatatcgacagccaggggttgacgcgcccggcgacgcaggaaagcagccatgtcgccaaaggcgaagggatgaagacctttttacgcaccctgcgcaaccgcaatatttcgctgacggcgggcaataccctgctgacgcaaatcgtctatatgggcattaacgttgtactgcccccgtatctttatcacgtctccggcctgtcgctggcggcgtccgccgggctgagtattatcttcacgcttaccggtaccctgggtcaggtaatctggccctggctgtcggatagctttggccgtaaacgaaccctgatcgtctgcggtctgtggatgagtatcggcattgcgctgttctatttcgccaccaatatgccgcgccttatcgccattcagctattttttggcctggtggccaacgccgtgtggcctatctactacgccatggcgtcggactccgccgaagaacgcgccacctctaccgctaacggaattatcaccacggcgatgtttatcggcggcggcatttcgccattgcttatgggctggctcattcagtttggcggcggctgggaaaatccagcgggttatatctacgccttctttaccatggcgggatgtgcgctgctggggatgttattacagctcatgaccaccgataaaacgccgcgcaaagcgcattaacgcaggagaacgtatgaagattgttatcgcgctggattcgtttaaaggtagctgtagcgcgcaggccgcttgcgcagcggtagcccagggattgcgccgggttgaccagacgctggagctggtcgaaatgcccgtgtccgacggcggagagggactgctgtcgactctggcggatagtccgttgcttaagggggcggtgtggcaacagcagcgctgtacctcgccttacggtctctccgtgcaggcggatttcctgatcctgcccggcgagcgggccattatcgagatggcgcaaagctgtgggctcgaactcacgccgccagcgcagcgggatgtgcgtcaggccagcagctacgggctgggcgaacaggtaaaggcggcgctggacgccgggtgtcggcacttgattatcggcctgggcggcagcgcgaccaacgatggcggcatcggttttgcccaggcgctcggcgcacgattctggcgtaaggacggcaccctgctgccggctcccgcggcaggtcaggacctggcgcatattcagcgcatcgatttgagcggtctggacccgcgtctacagcaaagcgaaatacaggcctcctgcgatgtcactaaccctctgcttggcgagcatggcgccacctgggtgtatggggcgcagaaaggcgcggacgaggcggcgctctgcgaactggaggcgggaatggcgcattatagccagctgcttacgcaaaccctcggattcgacgtcagcggacggcccggcgccggggccgcgggcggtatgggggctgcgcttatcgcctataccggcgccacgctgcgtccgggcattgacctggtgctggagctgcttaacgccgacgaccatcttcgcgatgccgcgctgacgatcgtgggtgaaggctggctcgatcggcagagcgcctttggtaaggccccggtgggcgtggcaggcaaagccgcacgccatggcgtgccggttgtggccctttgcggcgggcgtgatgagagcagccggcaattatatcaacaccatattgacgcaatgtggtctatttgccagcgccctatggcgctggcagagtcgatgaacacatgcgaaccgctcctcgccgacgccgcggagaatgttctacgaacctttctgagcgggtggcgcggagaggcacataagcggataactgtatgattattacaacagcgctggctaatgaaattgtcgcccgggcaatggcgataattcatcataacgtgaatgtgattgaccatcatggacagatcattgcctcaggtgaacggcatcgtatcggcgaacagcatgaagtcgcccgggaggtaatacgcaccgggaaacgcatttgtattaacaacgccgcggaagccgcgcgttttcacaacgtgcatcctggtattaatcatcccattatctatgacgatcgcgtggtgatggtggtaggcatcagcggcgatcccgcggcgataagccgctatgctgaactggcggtgctcaccgccgaactgctggtccgccaggccatagagatgcgggaaaccaactggcggcaacgtctgcgtgacaccttgttttgtcagtatctggaacaaggggctacgcccgccgggcaagaagcgcttcatcgcctgctggaacttggtttcgattttgatacaccgcgggttccgatcgtagtgaccgtgcaggtcgaacagcatcagttaagcgacatactgagtacgctgttgcgggaattctcgcagctctccggcgtaagtgacgttattttgctgggcagccatgaaatattgatcctcaacgcgctaagcgaagcccaggaaaccctgctgcggggcattgagtttgtactgagtaatcagataagccattaccatatcgggattggcgtgcagacggacagcgccccggacattcgcgaggccattcggttcgcccgctcggtgatcgaagtgggtagcaaagtgcagccgcagcggcagatctactactttcgcgaaatggcaatgctctgcctgttcagggtgctggaagacagctatatggtcaatttttttatcaataacgtacgccagctgcttgagcatgattccggcgaagtgctgctggataccctgagcagctttattgccaataatgccgaaccgggcaaaacgtcgctactgttggggattcatcgtaatacgctcacctatcggctgcagcaaattaaaaagcatatacagctcgatccgatggtcttcaccgacctgacgcagctggcggtgtcggtacactgttatcgccggctgaatccgcgccagagcgaatggattgatagcttaagctaacgtacgatagattcgaattgatgccccatccgccaggataagtggccaccatggccacttctttcctggcgtgggtaggaaactacgcttttgacgacggcgacagccactgatataccgcagacaaatcctctccggcatatcccgcgtccgccgcctgctgccacagttcggcgatgttttccagccccggcatggtgtgcggctcggccagggaaagcgccagccgggcatctttcagggcatgcgccagctgcatctgcggggtaaactgctcgctggcgatggcgtccagtttcactttgacatagggcgccgccagcgggccgccttccagggcgctccacagctggtcgggggtgaagcccagcgtcttcgccagctgggcgctttccgcgatgccctgcatcatcgaaatcagccaggcattgaggaccagcttcattttctggctgttgcccgcctcgccaaaccactgcgtcccgcgggagatagccgcaaacaccggttcggcagcggcgcccttttccctatcgccgctggcgagcaccaggatctgtgccttctccgctggggctttggtccccgacaccggggcatcaatataggtcatcgctggctgaagttcccgcaacaacgcgatggcctgccgggtctccggcaggccaatggtgcccatctggcaatagatcgcctgcggctgacaggcgggcgcgatttgcgccagtacctcgagggtggcctcgccgtcggcgagcatactgatgatcacctcggcatcggccaccgcctgctgcggcgtggcgtgcagagataacccatgcgcctgtaaatcttcgccgcgggctggcgaacggttccagccggcaacggtaaagccgtttttcagcaggttactggcaaaagcgtgtcccatggcgccgagtcccagcaccgcgacctttggtaatgtactcatcttgtctgtcctgattcgcgtcttaataaaagcggacctctactatcgcatctctggcacggatgtcagtagcaataacgggcatgaaaagtgacactgtcactgatattctcaaggctgacgaagccattccagtaagcggcgcatcgctggcgacaggctggcgtcatcctggtagcacaggcacaaacggcgctgcgcccagcggtcctgtaacccgatgacggcaaacgaataacgctgccggtaacgctcggcaataacgcgcggcaggatcgccccgccggcgccgtgcgccaccatctcgcaaagccctgcaaaatggctcatcctgacccgaacgtttagcgcctggccgagttcagctgcgtgctgttcgatatgctgctgtagcgcactggtctgatagagggcgaccaacggctcgttgagcaccgccgcaaacgccacttcctgtttttcggccagagggcgagctggcggcacgatcagcaccagcgggtcgtcagcgacgggatcgaggcgcagcggcccggggtcgaccgcatcggacaccactccggcctgcgccacgcccgccaggatacagctgacgatatccgcgctggtgcgttcttcggtttcgatctgcaccgccgggtgcgctgccatccaggcggcgagcttccccggcagaaaagccgacatcgccgaggtgttggcgaacaggcgcagcgtcccccgctgaccgcaggcgaaggcgtgcatcgcctggcgcagacgctgttgctgcgcaagaagcgggcgggcatggcgcgccagtacctccccggcctctgtcatcgtcactccacgggcatgacggtgcaacagcggcacgccgatctcggcctccatcttgcgcagcctctcactggcggacgccagggccagatgggcattcgccgctccgccggtgatactaccggtatccacgatggcgataaatagccgcagatcggccagatccagtcgcatcaggccctcctttaccttcggtttttccgtagtctatggccaacataccgcattgtggccctcacgaccagctgtttcaatgcccctttataccctgaaaagtgagccataatgttcgatttacacacgatctctttcctgttgatctttattgccgccgggctggtcaaaggggtgaccggcatgggattgcccaccgtggcgatgggcctgcttggcctgctgatgccgccgcaggccgcagcggcgctgctggtgcttccctcgctgctcaccaatctctggcagttactggcaggcccggcgctggcgcagattgtacgccgtctctggcttatgatgaccgggattattattggcacgttggccggatcctcactgctgatcggcctcaatcctcggtggtcggcgctggcgcttggcgccgcattgatagtctatgccgggtatgcgctctgcagtccggtgtttcaggtttccggccgcgtggagaagtggctgtcgccgctcatgggcgggctgaccggcgttatcaccggggcgaccggggtatttgttattccggccgttccctggctacaggcgctgggctttcgtcgcgacgagctggtgcaggccctggggttgtcgttcaccctttccactctggcgttggcggctggcctcgccctgcacgatggctggcatgatgatgcatggctattgtcggcgctggcgctgttgccggcgctgctcggcatgtggctgggaaagcggatccgctcgcgtctcagcccgcagcgctttcgtcagggctttctgttgttcctgctggcgctggggatagagctgatcgcccggggatggctggtctgaatcctctagcggcgggtaatgtgcttcacattgtacttactggtgttctggtagatctctgagaaatcgacgatcgcccggttctgggcgtagctgatcgactgcacccgcagcaggaggctgtttggcgccacctgcagcagctccgcctgctcacgggtcgccagcaccggggtatagctgcggtggctctcgatgatggtgatatggcactcttttttgaaatagttgaacttagactgctcgaggttacccacgctgagccaggggaaggtggcgaaggggatatagctgttttccaccaggattgggacctcatcgatcagccgcagccgtctgacgtaatacactttctcccccggctggatctttagctgctgggcaatggctggcggggcatcaagcagcgtaaattcaataactttgttacggtagttggtgacgcccaccacctgcatctggtagttaaagccctccagttccccgccatgatagttacttttacgcacaatgcaggttccgctgccgtgccgccgcgcgatcagcttttcttcctccagtagcgccagcgctttgcgcagcgtcatcaccgagaccttcagctccgcggcgagcgctttttcgctgggcagcatatcgccgacggcatagtcgtcgctgttgatgcgggtcctcagttcagtggcaatctttttataaatcacttttagatgtctcaatggagtggcgccagtcaacagtgaccatgaataacctcatgtaattaaatgattatttttatcttgcagcgaaaaaatcaacaacgacacatctataaatcacgccatatttatatatctgtccagcaacaatatatatgactttcgtcacagatggcccttttcctgctcgggatcccggtggtctgctcctagtctgataagcctattcatcaggtgatgacagcggtctgcaaagacgagaggacaaccatgattggagtgaaaaagcttcaggacttttccaaggcgatgatcgggccggtgctgtatctgccagctatcggcctgttgatcgccctgttcagcatgacgaccaaccggctgtgggtggatgaaagcagcgggctctacctggtggggaaatttgtctccagtatgctctgggcgctgatgaaccatcttgggtttctgttctgccttgggctggccagcggtctggcgaaaacccgcaaggccgaagcggccttcgtggcggccatgacctggctgatgtacctggcggcgaataatagctggctaaccctcacccatcgcctggcgaccggagccaccaacgcgcaactgtacggcagcggacaaacctttatcttcggttttcaggttatcgatatgggcgtattccttgggattatccttggctgcgctgtcgcctttgtccataatcgcgtggttgggattgagtttcgcggcgcgctgtcgatctacggcaacagtaagctggtgctgatcgtgatgttgccgctggttggcatgttcgccatcgccaccgtctatctctggccggtagtggagctgggcatctcggcgctgaccggctttatgaaatcctttggcgccatcggggtcttcctgtacggctttctcaaccggttcctgatccccaccgggctgcatcatctgatctggtcgccgttcgtttttacctctatcggcggtcagctgctgatcgatggtcagaccgtcattggcgctaagcctattttcctggccgaaatcgcccgccaccccgttgacgcgctcagtgattccgcccgtttcctcacctatgggatggtgaagatttttggcaccgccggcatggcgctcgccttctaccgtacggcgaaagcggagaataagcagcggctgaaagtcacgctgatccccttgattgttacctccgtcctggtggggatcaccgaaccttttgagtttctctttatcttcaccgccccattgctgtggcttatctactccctgctggacggttttttccagatgctggcctggctgcttcacgtcagggtctgcgccactaacggcctcatcgatttcgtcgtctataacctcccggcgggagtcggcgcgacgcgctggccggtgtttgtcgccctcggtctgctggaaaccgcgaccatgtacctggtcggcaccttctgtattacccgtctgcggctgctcaccccgggccgcgaaaccgcagccgaagatgagcattcgcaacaggctaatagcgagcatccggataaaggcgcgctggtgattgccgggctgggagggaaagagaatgtctgtgcggtgggcaactgttttacccgtctgcgggttgatgtgcgggaccccgcccttatccagcagacgctgttgaaagagagcggcgggagcagcgtgctgattaaaggaaaccatgtccaggttatctatggcctgggagttaacaaaattcgaacggcggtcaacgccagtctgggtgttattgaataacgaggtggtaaatgaaagataattttgtggtcaccattgccggcggcggcagtacttatacccctgggattgtgatgatgttactggaaaatatgtcgcgctttcccctgcgggagatccgtctgtatgacaaccatcaccagcgtcagaagactatcggcgacgcctgcgccatcctggtggctgaacgcttcccacaggtgaagttcagctataccaccgatccgcaggcggcctttaccgacgtcgatttcgtgatggcgcatattcgcgttggcctgtatgagatgcgggaaaaggatgaaaagatcccgctgaaatatggcgtgccgggccaggagacctgtggtccgggtgggattgcctacggtatgcgctcgattgccggggtgctggagctggtcgattatatgcagcagtacgcaccaggggcctggatgctcaactactccaacccggcggctatcgtcgcggaagcgacccgtcgcctgcggcccgacgcgcgcatcatcaacatttgcgatatgccggtggctatcgagggtctgttcgccgacatcctcggcctgccgtcgcgcaaagcgctgaacgttcgttactatggcctgaaccacttcggctggtggaccagcatcaccgataaagccggtaacgatttgatgccggcgctgaagcgtcacgtggcggagcagggatacagcagcccaaaagaagactttcagcataaggcgccgagttggatcgagacctttaaaaaggtgaaggatgtgtttgccctcgatccgacgacgctgcctaacacctatctgaaatactatctctacccggactatgaagtggcgcattccgacccggagtttacgcgggccaacgaggtgatggccggacgcgaaaaagaggtctttgatatggcccgggagatcacccgtcgcggcacggcggaaggcgcgcatttccatgccggggcccatgccacctttatcgtcgacctcgcctgcgccatcgcctttaacacccaggagcggatgctgttgatcgtcgagaacaacggagccatcgccaacttcgatgagacggcgatggtggaagtcccctgcctggtgggcgttaatggtccggaaccgctggcgatggggaaaatcccgtcattccagaaagggttgatggagcagcaggtggcagttgagaaactggtggttgacgcctggattgagggcagttaccagaaactgtggcaggccatcgccctgtcgaaaacggtgcccagcgcttcggtggcgaaagccatcctcgatgaactgatcgtcgccaacgaaggctactggcccgcactgcactgatctttttcgtgatgggtaagatgcagagaatccaccttctctgcatttttacccggtgtttcccccggtgatgcattcatccttaacctccgcccccgtgggcaaagcgaatcgctcatttcccccttcagaccggaggtaaaaggcctctatcttcattttgccccgatcgtgacaatgaaatataaattctattcttcaatattatggcgtaaaaatgtgatctgcgtagtattcttcgatttacattaacccactgaaaacaacatcgttattacctcactgtaaatttaacctgcttttcatggggatatactccctttagcctttgtgattggcttcatgcatttaccattctgcaacactgaattgaaattaaattttcataatgtgatcttgttgcatgttcattccatttctttgtgccatattcttaccacggtaaatcgccggagcgacagcaacgtgccacaccagagcgctgttcatcggcaaatgtcgtcgcgactgacgcactaaagaccgctaacccgcaaaggagaacggatatcgactacatccatgtcaacaccaagccgtaaacctctttgaccgccattgcttagcgtaccctgccttgtgctgagcaattacacaaagaagaaaatcatttaattcagttagatacgacaacacaggcgtgataaatcctgactggggagatgtatttttatcttgtgtcgttcaacaaaataaagggactaccatgtcatttataacaaacctgaaccagcaacagagaaaacgacttcatcagatcaccttagtggccacctccggcggcctgcttttcggttacgacaccggcgttatcaacggcgccttttcctcactgaagcagtacatggcgctgaccccaaccaccgaagggctggtaatgagcgttctgctggtcggcgccgcgctgggcagcgtgtttggcggcaaatttgccgattacttcggccggcgtaaatatttactctttctctcctttgtttttctcatcggcgcgttgctttccgccgcggcacccgatatcactacgctgctgattgcccgcgccctgctgggctatgccgtcggcggcgcttcggtcaccgcccccacttttatttcagaagtggcgcctaccgagatgcgcggcaagctgaccggcctgaatgaagtcgccatcgtcattggccagctggcggcatttgccatcaacgcgatcattggcatcatctggggccatctgccggacgtctggcgctatatgctgctggtacaagcgattccggccatctgcctgttcgttggcatgtggcgcgcgccggaaagcccgcgctggctgatcagcaaaaatcgtcatgatgaagcgctgcatatcctcaaacaaatccgcccggcggaacgcgcgcagaaggagtacgatgacatctctaccctgatcaaaattgaagctggtaataagtacagcgcccagagcacctttgcgacgattgtcaaaacaccctggatcctcaaaattttgctggtcggcattacctgggccgcactgcagcaaaccaccggcgttaacgtcattatgtattacggtacggaaatcctgagtgccgccggtttctcagagcgtacttcgctgatctgcaacgtgctgaacggtgttttctccgtgggcggtatgctgatcggggtactgttccttgtcgaccgcttcaaacgtaagacaatcatcatctacggtttcgccattatggcaaccctgcatctgattatcgccgctgtcgattacaccctggtgggtgacctgaaagctaccgccatctggctgctgggcgcgctgttcgtcggcgtgatgcagggctccatgggctttattacctgggtggtattagccgaactgttcccgctgaaattccgcggactgtcgatggggatctcggtatttttcatgtggatcatgaacgcggtggtcagctatctgttcccgctgctgcaggcaaaactgggccttggaccagtcttctttatcttcgccgccattaactatttagccattcttttcgtggtctttgccctgcccgagacctccaataaatcgcttgagcagttagaagcagagctgtcagcaaaccatgaagataaaaaatccactcgtcttaccagggaggttggttatgatcgataacatcacgctggataatctgcatattggctgcaaagccagtaataaagcggaagtcatcgccatgatcggcgcggagtttaaagccaaaggctatgtcaatcaggaatgtgtccactttctgctggagcgtgaacatcaggtctcgacctttttaggcaatggcatcaccctgccgcatttgccgaaatccgcgacggatatcatccttaaaaccgggattgagatctatcagtttcctgatggcgtaatctgggatcggagcaatgtaatgtttattgccatcggcgtgatcgcgaaagagaaagagcatattgacgtactcaaggaaattgcctcgatatttagcgatgagctgatcgctaacgcactgtcattaatctccgacaaacatgatttcctgaaaattctgcagcataacgccttgccccattaagtatgacaccgaccggagctctggccccggtcggattttcacccctcccccagcaaacatggcgaataatctgattctcccggttataacctcaatggtaataataaccagagaaaccaacgtattgctacttgcttgaagtacgcacgttaccgcaggtatctcataactaaaatcccgttaaaacaatgagataaatattctccagggctactgatcctcaggtttattgctcgcgctgttagcaccgtacgccagtgattcctgcggtattccattagttttgatttatatcaatacctgttcgatcgttaaaatgcattttacagcgcgattattttagcagggtgaatacgacattggttttacgattgggatatttatttagccgacccgcaagtctgtggggatggctgatgtgtaatgcgtttaacggtattgcgattgtcctctgctttcgtggcataagcatcgtcaccgatttcagcgaggcgatctggcaggtcatcatcacgctggctattatcatatcaacctggtacagcgctaactattttgctgcgctggaagctcgacgcgataaacgacgctatctgctgctggcctgggtggtcatgaccattctgttgaattttattcaccttggcggtggttaacgccatttattaaaggatcataccatgacgctggcgatgctgttggtgcttatcagccaccataaagggctgacgctcttgctgatcgtaattattgcgctgctgtttattgcgctcactccgctggtcaaaaaactgttgagtcaccttcacgatcgttcctgaattttcttttatgaccgcctacagggggccttctcttcgtcatctccgtttatcccgtcacccgctcccccagcatacagtttgtggcaacgccaaaaaaagaaatgagaaccattatcataaaagctgtgctaacgtgtcagcccaacaataacgccagaagcaacaaaacagggggacagacgaggtgaagttgagttcagggagcatcacaacaggtcgtacgagcgggctgctgacgctggcgattggcgcactcttctacagcagcggcagtattgcccggccggatcttcagccgctggggccgaacattgcggataaagggtcggcgttttaccactttacgcaacgccagtatgactctgccgatggcgaacgtcactaccgggtatggaccgcagtgccggacaaagccccgcccgccgccggctatccggtactgtatatgttggatggcaacgcggtgatggataaactcgacgacgcgtttctgcagcagctcttcgccggctccccgccggtgatcgtcgctatcggctaccagaccgcgctgccctttgataccgcagcccgtgcctgggattacaccccaccgctaaagacgcatgagcctcgcgccgggaaacccgcgctaccgccgcgtaaaaccgggggcaatgatgtttttcgccaactgctgaccgaaacgatggttccccagacggaagctaacctgaaaatagatccccaccagcgcgctatctggggccactcctacggcggattgtttgtgctcgacgcgtggaggaaggcttcgctgttcgggatctactattccgccagcccgtcgctaggtcaggccctgcaatcgcctttgcaggcaagccaaagtcttgatgccgtccgctttcgcgggaaatcgctgtacctactcgagggtgacggtaaagcccgtggagagccgtccgggcacgaggcctcgcttgaggtgttgcgtcaaacccaacagcagcttgccagtaaagggttgaccgtagccttctggcgctaccccggcctgacgcacggtcagatgttcgaggtctcgctgcgttcggcgctgctgcatctttccgggcaggcagcgcttgcgcatcagtaacgcccttacgcccaccagcggagggtgggcgcatcagcgccggtcgggcaggtgtttgatatcgaccggctcgccgaacagaaatccctgcatctcgtcacatccctcctcttcgaggatctgcagttgtccagccgtttccaccccctcggcgataagcggcgtattgatcgaattgcccagcgaaataatggctcgcacgaatgagcgtacctgagggttgctctccacatctgtcataaagctgcggtcgagtttgatgacgtcgaaatgaaaatcgcgcagcatgctcagggaggagtaaccggtgccaaagtcatccagcgcaatactgatccccattttttgcagatgatgcagaacgctgaacgccagctgtttattgatcacaaacgccgtttcggtgacctcaaactccagcagactgaccgggtaggcggtacgcatcaggatctcgcgaactttttcgataaagctacgatggcgcaactgcaccggagagatattgaccgaaacttttctgttcaaaccattttccagcgattcgttacacacctgctcgagcacccagtaacctaagggcacgatggcgccgctctcttcggcgatgggaataaacacgtccggcgggatcgtccccagctgcggatgctgccagcgcagcagcgcctcgtaaccggtgatgctacgatctttgatgttgcggatagcctgatagtggagcgaaaactccccggcgtgaataccgcgccggatatcggcggccatcatattgcgctgccgcgtcttgtcatccatttcacgttcataccagcaaatcttatggtcgaggctgctttttgcccgatacatagccagatcggaattgctcagtatcgtattaatatccgtgccgtcttccgggtagactgagatgccaatgctggcggagagaaccacttccgtcgcggcaaacgtctgcttaccgctgaagcagtgccacaggcgcgcagcaaaggcatccacttccccctcatcggaaaaaggtttaacggccacaaactcatcgccgccgaagcgggcgaccatctcctccttctgcagcgttttgagcacggcgcccgccacgcgctgcagcagctggtcaccaatcagatggccctgcagatcgttaatctctttaaatttgtctaaatcgatcgtgaaaatggcaaagcggcgggcatcatttccagtgatcagcttctccacccgttcaaaaaactccacccgattgggtaaaccggttaacgcatcgtagcgcgccatccaggcgatgcggtcgttaatcgccttctgttcactaatgtcgcgggtaattttggcaaaacccagcagggtgttctgctcatcgcggatagtatcgatcatgacatgcgcccagaatcgggacccgtctttgcgataccgccagccttccccttcaaactgcccgctacgcagggcgatttccaggttttttgcgggtacaccggagagttgctcagcttcgctatagaagagaccgaagtagcgaccgatgatctcgtcgctcaggtacccttttgcccggcgggcgccctcattccagctaatgaccgtgccgtcggcgctcagcatatagatggcataatctttaacgctttcaataaagtggcgataggcaatatccgtcaggtgatcgttactcatggtacagcgctctctgtggctcggtcgtggcaaaacgcattagatatagcagaattacgcctattaagaatacaaggagatagccttttgttggcctctttctgacccggacaccgcagtaggcgcggcggacgctctcgttaagagtagtggaccaggccgtccgaaggagtgatattccccgcgatttttgcacttaggtcgcccactaatagttacttttattgattaaaaagtttgattgaaagaataaataaaaggagtaatgttaataatactttctatggaggttaaatatgttgcgtgattatttaaaagtggaaaaagaagaccagcttgttgaacaacagagtcggcatgacaatagccagcattattcttcggtgaccgaatgggttattttaagtaaagatggccagcgcaaaggccgggtatccctgtttgaccgcttcaccacccgccgctcctggagcgacagtttccgcattacgcagttcgataatgcgggtaaagtggtggtggataaactcactgacgcgctgtaaatccttcggattcccggcctgacgggagaatattaatacgcaaaattaacacctgcataaaatatattgatgcgtcgccatcatgttattttctttctgcataccgataatctaatgggtaattttcgccatggtgcacagcgcgaatttttaacccgaaaaaatgctgaatataagcccgctggtcgggcttttttgcatggtgctcgccatctacgccacaaaatgccaaggacatcccgcgctggattgtatacgatgtatatacgaatcgtaacggtatatatctatgggaatcgtcaaaatctccgatctgctgcacgatgatattcgtgatgccagcaaagccatgtcccgctccgtcaatgcccaggcggaatactggatccgtctgggcatgatgagcgaactctaccctgagcttaaccaccagcagatcaaactgctgatgctgaaatccggctctgaccgtctgctggaggtgatcaatgccatcaataatcattaaaaccgccgacgaactcgcccggcagcgccatgccggccagctgctggcgtcagtgtttgatatgctggatacttttatcgttcccggcgtaacgacgatggcgattaacgatcgagtggaagattttatcgtcaaccagctgcacgcccgcccggccagcaaggggcaatacgattttccctatgtgttgaacacttccattaacgatgtggtgtgccacgggatccccaaagcgaccgaacatctgcgctccgggatgattgttaacgtcgatatcaccctcgagaaagcgggcatgattgccgactccagtaagatgtacctgataggcgatgtctccccgctggcccgccggctggtaaagactacctatgaagcgatgtggaaaggcattgaggtggtgaagcctggcgcgacgctgggcgatattggccacgctattcagcgctgggtggaggaacatggctatagcgtggtcagagaatattgcggtcacggcgtcggtcaggaaatgcatgaggaaccgcaggtgctgcattacggccgccccggagaaggcgccgtgctgcaggaaggcatggtgttcaccattgagccgatggtcaaccagggcgacagccgtatcaaaaccaaaaaagatggctggacggtggttacccgcgataaaaaactctccgcgcaatgggagcacaccgtggccgtcaccgccaacggttttgaggtgctgacgttacgcgacgatgaacagtcgcggatccgctgagttgcttccctttctctatgacggtgggccgctttccgaccccggagctcgcttgggcgccagacgacacctgattctgccgccgggcggcggcaataattgttttcatgaatgatttctgcgcgcgcgtctgcccgctggttatggctgatgcgcgcataaaccgcacaacggtttatcctttacctccttgcatcagcttactcttcattgcctttatcccgccttagcgatagcgaataatgacatccgcttcactatgctgcgcatttcgccagtgaatactgacctcaccacgattgtccggcatggcgtagcgaggacggttgtttgtcaaggcgacctgttccggtgaatggtgctggcacgagacatcgatacgatcgtgccggggggcgataacacaggccggattgatgacccgtcctgaaaaatgaacctggccggaaagcgcagcagacgacgccagcggcgccaggcacagacatagcagagcgagacggaatggagacatagcaatcttccttgataacgggtgacactgcgcggcacagcatcgtttctgtgccctacaacctgcggcttcctgccgtcactccacgctactgcaaaatagcggcagcgtaaatgattattccgggtcacccggtcaactgccgggaataacagcaactttttcgtaaaatttgctcagaacagttatctcacggaaataatgcattatacgtatgggactctttttaatatttaatgagattatacttacaccaaaaaataaataatgttacagcttaacacatcttatcaatgggcctttacgatgttctccgtataatcccgcccccgacggtaatatacattagcgatgcttaccgtttttttgtgaacagaaataaaaaacatgctttaaaaatgttaaacgcttttgttaacttgtgattatttaataaggtttgagtatgaaagaaaaaggcaccctgctggttgttggttcactgctggccttaagtctggctactgtgaccaccgcccgcgcggcgggtacactgaatttcaccggtaaaattattaacgagtcctgccagatcgccaataacggtggcgatgttaatgtcgattttggcaacgtcgatatgtcggcgctgaaatcccatgaagcgaaaaccgcagaaacgccgttcactatcaacctcaccggttgcccactggcgcagaacatcagtatcagcctggaaggtactccggacactaacgctaacggcaccagcgccgccgtgctggcgctctctgacgccgcggataccgccaaaggggtgggcattgaagtcttctcttcccctgacggctcaacggaaggcactcagctgacctttgacaagcagagcaaaacggcggtttcgcaagccgacgaaaacggtgatattgcatttaactttattgccgatctgaagagcgattcctcacaggatgtcaccgccggcaatattaatgccacggccaatattgatattgtgtacgaatagaatgtcctgattgccacttttccaagggcagcgtccccctgcccttattctcattcctcgtgaccggatcctcaattatgcagtgttataaagcggcttttatcctgagccttctcttttgcccgttcctggcgtctgccgccggggttgccattgccggcacacgtgtcatttataatgaacaaagccatgaggcagacatcacggtaaaaaacaccaatcctcacgatccggtgcttattcagagctgggtagacgatctggctgataataataaatcaccgtttatcgtcaccccgccattgttccgtctggatgccggagacagcaacgatctgcgcgtgttattaacctcggcgcaactgccaaacgatcgggaaagtttgttcaccctgaatatcaaagtgatccctgccaataccgcgccggctggcgagaacattctgcaatttgctattaagaatcaactgaagctcatttatcgcccggcagggctccctggctcggcgctcgacgcggcgcagcacctgcgctggcgggtcagcgacaaccacctgcaggcggagaatgcctccccctattatgtgactatcaccacgctcacctgcgcgggccagaaccagaaaacgccgcttgagcgcagcgtgattgctcctcacagccgtgaagattattccctccccggcgaggcctgcgcccgcgaggtgagctggcgcattctggatgactttggcgctgtgcagacgtttagcgcccccgtttcggcgcactaagcgtctgatgtcgcgatgcgccacggcccggctcataccgttaccgtcgtcagcctctccatcctgctgggcggacagagcgcgctcttgcacgcccaggcgacctttaatatggatctgctggagaaaaacgaccatttgccggcagtggatctgcaacgcttcaatcagcaggcgggccagccgccaggcgcctatccggtgagctggcaggtcaacggcgtcacgctggacgcccgtaagaccgtcacgtttcgccagaacgatcgcggacagctcacgccctgccttaagccggaagatctgctgcaggccggagttaacccggccgtgctgtcccaggcgcccggcgcaacgtcccgctcatgtcccgaactcaacgcactgctgccgggcagcacggtcaatttcgattttgctcatcagcggctggtaatgaccattcctcaggcgctgatgacgcaccgggcgagggataatgttccctctgcgctgtgggacgaaggtattagcgcctttcagagtaactatcgttattcaggcgccagccagcgtacccgcgagggcagcaccgagcgcgataactatctgatgttgaaaagcggcgtgaacgtcggcgcctggcgcctgcgcgccagcaatagcctgaccgccaacagcgatgataagccccagtggacgaccagcggcgcctggcttgagcgcgacctgacgcgctggcagagtgaactgaccctcggggataccttcacgtcgggcgatgtgtttgacgcggtacagtttcagggaatatccctcgcctccagcgatgcgatgctcccggactcgcagaaaggttttgccccgaccatccgcgggattgccagaaccaacgcccaggtcacggttcggcaaaatggctacgtgctgtatcaaacctacgtcacccccggcgcgttcgtgattgacgatctttatcccaccgccagcagcggcaatcttgaggttgccgtcaaagagtcggatggcgaaatccgccgcttcacccagccgtatgcttcggtgaccagcatgcagcgcgaaggcagcctgaaatacaacctggtcgccgggcgctaccatagcgacgatgccagccagcgaccgttgatgatgcagctgtcgctgatgcgcgggttcgcccacaacctgacgctgtttggcggactgcagagcgcggcgcaataccataacctctcggtcggcgcaggacaggggttgggagaagccggggcgctctcgctgcagctgttaaacgcccgcgaccggcaccagcaggatccgatcgatggccgggcctggcagctccagtacagcaaaggttttgatcgtcttggcacgcagttcaccttcaccggctggcgttattcgcatcagcgctatgccacgctgagcgaggcgttttccagcccgggtagcgaagacgacctgcaggatagcgacaacaaaaaagcaaccctgcaaatcaccgccagccagagcctgccgtacgatatcaccctctatctgagcctcgaccaggacagctactggtcagggggcgcctcacagcgtaccgccaatatggggatcagcagccaggttcacggtatcgcgtggtcgctcagctacagcgactcccgcagcagccacggtgacgaggaggatgaggagccgcattccgacaaagtggtgacattgtcactttccgtgccgttgagccacctgctgccggggagctatgccggctataccctgacctcctcccgccacagcgttggcagtcagatggtcagcctcaacggcacattgctggacaatcacgcgcttagctacgccgtcagccaaacccgcgaccggcaaaacgggtccagcggcagcctgacggccgggtacagcagtggaaggggcaatctgaatctcggctacagccacgattcgcaggccgctcgtctgaactacggcgccagcgggggcattctgattcaccgccacggggtagtctttacaccggaaatgaatggcgctgtcgtcctgattgacgccggtggcgccgggggggtgaccctcgccaaccagaaaaccatcgccaccaatggtgacgggtacgccgtgctgcccttcgccaccgcctatcaccgcaacgacgtctctctcgatagccattcgctgccggagaatgtggatctggccaacagcaccgtgacgctggtccctaccaaagacgcggtggttctggcgcgctttcacacccacgttggctataaggcgctgtttacgctgcagtcgcggggacaaccgctgccctttggcagcgaagtacgcgccaaagacaccaacagcatcgttgccagcgagggtcaggtgtacctggccggcctggcgccaaaaggcaccctttatgcgcaatgggggccgggccctcagcagcgctgtagcgcccgctacgatctcaccccgacgctggcgcagaccccccatccactcattttacagcagacgttatcatgtcctttttaactctcctgcgtcgggtcgccatgacgctgttatttattctgttaccggccgccagcggatgggcctgtacgccagtgtttgtccgcggccaggcctccacccttcggctgaacgtggggcagctcacggttccggctgacgccagacccggcaccccgctgtatcataaaagtttcgcctggaaccgccttagcgacggcggcgaacagtggatccgctgcgcggacgatccgcacgggctgtcaccgctgctgctggacagtctgctgtccgggggagtgacgcgaccgacggtttatcaaactaacctcgccggcattggcgttcgcgtatcgctgcgcgctatcggcggctatggcggctttcctgaccggccgacgccctcgccgtttagccaacgggtggacaatcccgccgccttgcccgatgcagtgtggaaactgggctatttccgcctgacgattgagctcattaaaaccggcgccgcggcgacgccgggccagcttgagtatcacagcgagcgctttttaatggcggagcataccccgctggccgcgttagacttaaccggcaggatcagcaccgcgggatgttcagtgaatgacgccacgccagccctgatcaagctccctgcggcgatgcttgaccacttcggcggcgtcggcaaaaccaccggcgacacccctttcgcgctgcagctggattgcaacagcgcggtcacggtttccctgcgagttgacggcgcggagcccctcaccgcccgggggcatggcgttctgcgcaatgacgccaccgacgatcgggcgcagggtattggcgtgcagttgctttaccatcgtcagccggtcgtactgaatcatgagatgacgctgggcagcgcgagcgcgggccggtttaccctgccgctcactgcccgctactaccagacacgttcccggatcaccgccggtcaggtgtcggccgtcgcgacctataccttgcattatgactaggcgatggcgaaccgacggatgaagcggatgaaggaattgctctgaccggcgaatcgtaagagaatagcgcctacacgcgacgatctgagtacacgggagttcatcatcagccattctcgtcgattccccttagccagcaaagtggcgctggcaggcgcggcgctcatcgccgctggcatgctgttcagctgcaccagtaaagcccctaaatcccttgtcacgccgccgaacgctgccgccgtcaaagccgggcaggcgcaccgggagccggtgcgcggcgtgtggctcaccaccgtttcgcgccttgactggccgccggtcgggtcgattatcgccagcacgccggagagccgcatcacgcagcagaagctggcgctgatcgctaaactcgataacctgcagcgcctggggatcaacaccgtctttttccaggtgaaaccggacggtacggcgctctggcggtcggatattctgccgtggtccgatatgctgaccggcaaaatcggcgaataccctggctacgatccgctgcagtttatgctggatgaagcgcacaagcgcggcatgaaggttcacgcgtggtttaacccctaccgcgtctcggtcaacaccaaaccgtcgacgattgccgagctgaacaacaccctcacccaggtaccggccagcgtgttcgtcctgcaccgtaactggatccgcaccgccagcgatcgctttgtcctcgacccgggcattcccgaagcgcgtgactggatcaccagcatcgtcgctgaagtggtgcagaactacccgattgacggcgtgcagttcgacgactatttctacaccgaaaccgcctcttcaccgcttaacgacaacgagactttccgccgttacgggcagggctatgcctcgaagggcgactggcggcggcataacacccagcagctcatagcccaggtttccaccaccatcaaaaagctcaatccgaacgtcgagtttggcgtgagcccggccggggtgtggcgcaaccgctcccacgatccggcggggtcggatacccggggcgcggccgcctatgatgaatcctatgccgatacccgcagctgggtgcagcagggactgctcgactacatcgcgccgcagatctactggccgtttgcccgcgatgccgcgcgctatgatgtgctggccaactggtgggccgaggtggttaaaccgacccatacccggctgtatatcggcgtggcgctgtacaaggtgggtgaaccgtccaaaaacgagcctgactggacggtggatggcggcgtgccggagctgaaaaagcagctcgatctcaatgagactctgccgcagatccagggcaccatcttgttccgcgaaaacaacctcaatcagccgcaaacccggcaggcggttaactatttgcgcagccgctgggggcagccgcagagctagccgccagccggctctgctatagcgcctgcagcccttgctgcaggcgggcgtgcagcttcagcatgttctctgtaatggcctgccagacgtggctggaaaagtccgccggcagcgtccggcgagcgctttcgattgcctgcggcacatgcccggcaaactcctggaggatcgccagcatctgctcccggggaaagttcaccgctttggccgtcgccagaaaatgacgcggatagatggcgttaatctctgttttactcccttttgtggcattgagccccatcgacagcttcagatcgcgcagatgcagtcccgtgccgcccagcaccggaaacgccgaaataatgtcgtagaacggtgttaagcggtagctgccgccgggcaacaggtaaattgagaagttttttgcgtgaccgtccgtcgcccccgtcagccactggaagaccatgaacttcataaagtcatagcgatctttcagcgcttcactcgagcccagcagaaaggtcatgatcgcggcgatacccggcccgccgtcagactcatatttcatcgctgaaggaagaccaaaagcctgacacagatcctcctgcggcagacgcagcagcacccgtccctcctgcgcccagcgccggtcgaagcgggttaccgccagggcgcggatccgcggagtggcgatgatctccgcttccggcaccgccaggcccagttctctggccagcgccaggcacagatactcattatccacgctttcacgcagatccagcgtcgcattgggctgctttatctcgccgatgggcagcttaatgatatgcgtggtcggcgtggcgccctgcggaatacaccactgctcgcccatccgcagcagcgccgttttctcctgggcgccggccaccgagatacggaaatcgtcctggctggtaatcatcccgagggggatatccgactggtaagcggtcagcaaagtggtgagctgcgcctcgtccagcgtctgccagcgtaatccttccaggtgcgcctcttcccccggcggcaggagggtcaccgcccctacgctatcccgcccgacttcggccagcagatcgaacggctgcttcgagcgcgcctgatagcgcctgacgatccggtcgcggacctgcgggctgtcgggcagcaggttatcaaaatagtgatacaccgcgtcggcagtgatattgccatactgcagcggcagtgagagggagagcggtctggcgcgcgggctgcgcagccactcttcgtcatagcgaaaactgtgcgccccgttagcctggcgggttaaggttcccacgcgcacattgttcatccaggtggtaagcgtcgccattaccagtcaaggtccgtgttgttatcgggagccggcgccgtctcagcagctttggcgttcagcgtcatcaccacccccagcgactggaggatcttaaacagcgtggttaaggtggttttgtcggggtgattttcaaaattggacagcgtggcctgcttaatgccgatccgcctggccagcgcatcctgggtccagtggttctgctggcgcagcagcttcaggtaattggccagctgcacgggactgtatatctgcggggaattcatcgccttgttcctcaccatcatttatccccctgtcgggataaacttggttttataccctacagggtataatgtcaaggatatcccctggtggggataagagaataattatccttgtgtggggataaaacaagaaggatgatcgccgaggccatctgtacatgcccggtggcggctgcgccttaccgggcctacgggctgtctctgcccgctccgtaacgatccaggccgggcaagcgcagcgccgcccggcagcgagcagccggcttagctgccgcggtaggtcgaccacccgcccggggcgatgagaaacggcagatggaaatggtcctctgccgcctcgccgacaacaaaatcaatctgcgcccgggtaaagacgctctcgcgcccggcgcgggcaaaccacgccccggtttccgctgttaagcaatagcgccccgccggcagcggcgcggcgctaaaggtggcgatacgcccctgggcgttggtcaccaggttcgccagcgtctcgccctccctactcaggctgaccgtcacgccttccgccggcgtgccggtggaaatatccagaatatgggtgctcagggtgctcattcgccaatcgctccttccagtcttaacatcgtaatttcccgcagctgggcaagcgcctcggccacttcttcgtcggcggtatgctgcagccggcgcgtcagcgcctgcagaatctcttcgccgctgcgacctttggcgcggattaaaaacacccggccaaagcgggcttcgtagcgggcattcccctcccgcagggcctgcgcgagccgctcattctcgctgtccaccgacgactgctcctggcgcgacagcgccgcgtgcgcctggctgccggtcggcttctcaccgatccgcggatgggcgctgagcgccgcgttcagctcgtcctctccccagttagccatcgcctcccgggcggtctgcagcagcgcatggcggctggcgaaaggtcgcaagttcaccagcgtctcgccccaggccgggatcgccacgcagggggccagcagccccactgcctcatctttactcaggccgttaaactgactcagcgcgatcatcctgactccttaacgatttcgtcgccgcctgctcctgcggcagaataaggttcagcgctatcgctaccagcccaccgctggtggctgccgaaccgaacagatcgccgaccatcggcggaaaatggctgagaaacgccggcaccgactccacgccaagacccgcgccaaacgccagccccacgatcagcacatcgcgacggctcagcggggtctgggtaataatccggatcccggccgccaccacgcagccaaacatcaccatcgtggcgccccccagcaccggcgccgggatctgccgcagcagttcgcccaccgggggaaacagcccgagcaggatcagaatcacgccaatgtagcgtccgacatagcggctggccaccccggtcatctggatcacgccgttgttctgcgcgaaggtggtgttcggaaaagcacagagcatggccgccaccatacagctgacgccatccgccaggataccgcccttcagccggttacgaaaagcgcgatcgtcaacagactgttgcgaaatgagcgagttggccgtcagatcgcccaccgcctccagaatacagaccagcgacaccagggcgaccggcagaaatatcgcgctgttaaactgaaagccgaacggaaacagcgtcggcaggcgaaacagagtgtcgcccaggctgtgaagatggaactgaccgctcagccccgctgcgatgcagcccacggcaatgcccaccaccaccgaggagagccgcagccagcggtttttggcgcagctcagcaggacgataaccccgagggtgcccgccccgagcgcgatattgctcatgctggcgaaatcctcggccttttccccaccgcaccagttgatgacgctgaccttgatcaggctgatgccgatcagcgcaatcacgctgccggtaatgatgggagtaaagattttcttcagcggttcgataaagcggctgacaatcaccggcaccagagcggcgacaaagttaacgccaaacagcatcgccatcatatcctgcggcccgccgccctgggcttttacccacatccctccggccaccgtcacgccgaggaaggcaaaactggtgccctgcatgcagatcatcccggcgccgatgccccatacccgattggactgcagaaaagtgccaatgcccgaggccagcagcgacatactgatgagatacggcagccagtcgccaagcccgagggtagcgccgataatcagcggcggcgtgatgatccccaccaggcccgccagcacatgctggagagcgctgaaaaaggccggaagcggtgggatccgctgttcaaggccgtaaagcaggccactgtgatgttcgtcagacatagtgatatcccgtagcaaagagaagtgcatgggcttgtgcacaaagcaggccagagacgacaaaagggcaccaataaatttattatcactccaaaatcatcaacttagattacgctcgtgatgcatcactcctcttcgctgctgaaccaggcgcctgaaacgatagattcttaatgcaacatacagaaacttttgattcataaaaaggcaaccaatacctcacattgcaccgatgcggtgcgtcatgagccatcgctgtgcctcaggcaggcggttttcctccctccagcgaactggtacgcaaattgctgtagtcagtcacaacatcgggagaaggagaaaaaaatgaaagcaatcgtgattggcgccggcatcggcggtttaagcgcggcagtggcgctcaaacagtcggggatcgactgcgacgtctatgaagcggtgaaagagatcaaaccggtcggcgcagcgatttccgtgtggcccaacggcgtgaagtgcatggcccacctcggcatgggcgacatcatggagaccttcggcgggccgctgcgccggatggcgtatcgtgatttccgcagcggcgagaacatgacccagttcagtctcgccccgctgatcgaacgcaccggcagccgcccctgcccggtctcccgggcagaactgcagcgggaaatgctggattactggggacgggacagcgtgcagttcggcaaacgcgtcacccgctgtgaagaagacgccgacggcgtgacggtatggtttaccgacggcagcagcgccagcggcgatctactgattgccgccgacggcagccattccgcactgcgtccgtgggtgctgggctttaccccgcagcgccgctacgccggctacgtcaactggaacggtctggtggagatagatgaagcgctggcccccggcgatcagtggaccacctttgtcggcgaaggcaagcgcgtctcgctgatgccggtctccgccggccggttctactttttctttgatgtgccgcttccggcgggtctggcggaggatcgtgacaccctgcgcgctgacctcagccgctactttgccggctgggcgccgccggtgcagaagctgatcgccgccctcgacccgcagactaccaaccgcattgaaatccatgatatcgaacctttcagccgcctggtgcgcggccgcgtcgcgctgctcggcgatgccggacacagcaccaccccggatattggccagggaggctgcgcggcgatggaagatgcagtggtgctgggcgccgttttccgccagacccgagatattgcggccgccctgcgcgagtatgaagcccagcgctgcgaccgggttcgtgacctggtgctgaaggcgcgcaagcggtgcgatattacccacgggaaggatatgcagctcaccgaagcctggtaccaggagctgcgtgaggagaccggggagcgcattatcaacggcatgtgcgacaccatcctcagcgggccgctgggctgaccgtcgccatggattcgatcaccgcactcagcgtctgaatggccatttgcgcgggccgcgaaagctgacgcgagggcgcagtacacagcgccagggtcagcggtcgcaacagcgtactgcgcagcgggacaaaggccagctgtccacgctggacctcgtccagcacgtcgagcaggctaaggagcgtcacgccgctgccgcgtagcaccaacgacttgataagccggatatcattgcagctgatggtattctccggcgcaaagtcatggtggcgatagaggagcgccaccagctcatggacgatcagcggcgcgccgggcacgatatgccgctccaggctgagctcgcccaaagacagcgctttcgcccccgccaggggatggtccggacgcatcacaatccccacctccagttcggcaaaggccagcacgctgagtccagcctgcccctgcggatcgaggatcaggccgacgtccaggtccgcctgacgcactttctggctgacggtgtggctgtcagccacctgcagatccagctccagccacggccagctggcgatgatctccgccagcgcggcggcgaagcccccttccgccagcgcctgcaccatgccaacgctaacgcttccgcgcttcatcccctgcagctcatcgaatttctgccgcgtctgacgaaattccttctgccagcgcagcagattgtcatacagcaactcaccggcggtggtcatccgcagtccctccggcaggcgctcgaacagcggggtaccgaaggcctcctcggcctgcaggatctggcggttaattgccgaggcggagatatgcagctgctcggcggcccggcgcagactgccgcagcgggccacggcgatgaaatagtgcgcgaaacgggaaaatggactcatggcgcccctgtactcttttttgcaacagcagagtgaattaatggtgatggatgtgaacaccctaatatgacaacaataatctcacaacaataaaacaatcaccgatgtgagcaggaagagaaatcatgaagacaatcacccccacgccccccgcccattgcacctttgacccggaagactggctgcggctggcccgctgctggcacccggtggcccgcgcctgcgatattgccggcgccccggtgaaagccaccctgctggacgaacagttggttatctatcgtattaaaggccaggtggtagtcgcccgcgacgtctgcccgcaccgaggggtgccgctgaccctggggtttcatgaagaagaaggcatcgtctgcccctatcatggcctgcgctttggcgaggatggccgctgcaaccgtatcccctccagtccggggcaacccattccggccaaactgcatctcaccagcttcgccgtggaggagcgctacgggctgatttggacctgcctggcctgcgatccggacaatccgccgccgttaccgaccatgccgcactgggacgacgcgggatttcagcaaatcaactgcccggccttcgaggtaaagggatttgccggccgccaggtcgaaggctttctcgatgtcgcccacttcgcgtggatccacaccgacaccttcgccgatccggacaaccagcaggtgccggactatagcccgcaggagacgccgttcggctttgttgccgactactggagctcggtgggcaattacccggccagctctgatttccgcgcgccggaaggattccagtggctgcgtcactttgaaatgcatctgccgttcaccgctacgctgaccatccattttcccgccgacgccaggctggtgatcatgaacgccgcctcgccggtgtcgtcccgggtgacgcggatgtttgcccctattgcccgcaacttcgatctgcacgtgccggtggaagacgtacatgcgttcaacctgcgggtatttgaagaggaccgcctgatggtcgagacccagcgtccggaacggttgccgctggatctgaccctcgaggcgcatattccggcagaccgcagctctatcgcctaccggcgcgggctgaagaagatgggttttggcgatttctttctggtatgagtggaggtcatatgcgcgacatactcccggtggtggtcgatggcctgtggcgccagggcgcgaaaaatctggccgttcgtctggtgagcgccgaggggcaaccgctgccggcgtggacgcccggcgcccatatcgatctccatcttccctgcgggctgatccgtcagtactccctgaccggcagcccggccgaacgggatcgctatctgctctgcatcgcccgcgagtcgcagtctcgcggtggctcccgttatattcatgacaccctgcgcccgggacagccattgatgatctctgccccgcgcaaccactttccgctgcacgagggcggccatgtggtgcttctcgccgccgggatcggcattacgccgctgctggcgatggcccacgcccgggcggcgtccggcgccagctttacgctgcactattacgttagccgtgcgcaggaggccgccttcgccaccgagatcgaccgccagctaacgggtggaatctgccagatccactgctcagacgaggggcagagtccgcgccagcggctggcgcaggatctgggggctccggacgccgacacccgggtctacttttgcggtccgcccggatttatggcccgggttcgcgataccgcacgggcggccggatgggaggaggcgcaattgcacagcgaagcgttccagccgcccgccccgacggcggcgtcggcggcggacggaaccttcaccatcaccctcacctccaccggggagcgctggccggtgccgggggacaaaaccatcgcccaggtgctgcaggagcatggcgtcgcggtgccgctctcctgcgagatggggatctgcggcgcctgcctgacgccggtacgcgagggaaccgtcgaccaccgggataccgtgcagtcggaggcggaaaaacaggccgcagagcagcatattgcgctgtgctgctcccgcagcctgtcggccaatttagttatcgatctcgcgggataagcggcccgtcaccggctggtcggcgcgggcgaccggtttcacccgtacggcggcgaagacaatcaccatcgagctcaacagcagcagaccgctgccggtgaagacgccgctggcgccgtgcaaatcaaacaccgccccgccgccggcggccccggcgctgatggccagctgaatagaggcgaccagcagaccgcccgcgctttccgcttcatccggcacggtggtggcaagccaggtggaccaggccaccggcaccaggccgaaggcaaatccccacagggcgaccagcagcccggccagcacggtcagatggccaaacgtcaccatcagcagcgccagaacgctcatcatcaacggcaccagcgccagggtcaggcgcaggctacggctcagcagatagctcgccaccgaagtgccgataaagttagcgataccgaagccgagcaagatcagcgaaaccccttcgacactggcctgcgcgacggtctcaaggaacggccgcaggtaggtaaagaaggcgaaatggccgctgaaaatcaggatcgtcgccagcatgccgcccagcataccgggacggcgcagcactctgaacagcgtggagaaggtcccgacgctctccgggcgcacccacagctgccagagcagcgccagcaggctgggtatcgcacagagaataaacacgttgcgccagccgatcagctccccgaggtagctgccgagcggcgcggccaccaccgtggcgacagacaccgcggaaaagatgatcgccagcgcctttggcacatgggccgccggcaccagacgcatcgccgtggcggtggacatcgcccagaagccgccgatggcgatccccaacagcagacggcccagcaggagaaacgccagcgaatcggcaaacgcgaccatcaggctggagactatctgcagtatggaaaagaacatcagcacccagcggcgatcgatattgcgggtggcggtggcgatcagcaggccggtaactaacgccaccagcgccgtcgcggtgaccgcctgtccggccatcccttcactgacgccgaggctgctggccatcggcgttaacaggctggcgggcagaaactcggccacgatcaggccgaacaccccgagggccagggcatagacggcgcgccaggcaggtttggcggatgacaggctcgcgtcagcagctatgcaggaactcatatacaactctccaggtttattaacatcctggtcatcttagggccttactttcggacgatatatgatgcatactcttcagttattgattattcgtccggaattaccatgagccagcctgccatcgatctgaccagcgaactgttgcgcggtatgcgcctctccggcgttaactaccggcgcatcgaaaccgcacgcccgttcggcgtcggctttagcgccgtggcgggtaaagcccagttccatttcatcagccgcgggccggtgctgctgcgcatggccagcggggaacagttcaccctcgagagcggcgatgcgctgtttattcccaacggcgacgggcacgccctgctctcggatccgcaggccacggtggtcaatgtggcgcagctgcccagcgaaacggtgtgcagcacggtaagttgtatcaacgctggcgaccagcctgactgcccggagcgcgccgtcattttcagcggttgtatggactttgagctcggcggcatgcagccgctggtgaaggccatgcccgaggtgatgcgggtcagcagcctgctaaacacctggccggagatccagccgctgttggtagcgatggagcgggaatccctcacccgccaggcgggctatgccgggatcctcgcccggctggcggacgtggtggccgcgctgattgtccgcggctgggtagcgtgcgggtgcggcaacgccaccggctgggtacaggtcctgcgcgatccccggctggcgaaagcgatctacgccatgcatcagcgcccgggggtcaactggaaagtggaagatctggcgcgggaggcgggtctttcacgctcgctattcgcggaacgttttctcgccgccaccggcaccacccccgcccgctatctcaccgagctgcgtatgcggctggcggtgcagtacatcacccatgaaggccaggcgctggaaaaagtcgccttcagcctcgggtatcaatcgctggcggccttcagccgggctttcaaacgcatcaccggccagccgccgggggccctgcgcgccacggcacgctagagtcagcctttatgtaaagcgatacacgccgttgccgacacgaaagcgctgccccttaagcgccgggttggcgacgcggaacaccagttcggtcagctggttggcagcccctttacggaagataaattgctggccgcccacgtccagtccctgctcccccagtggcggaaagcccagcagcgcctgccagcgatcgcgcaccgcctgcggattgaccacctcgaacaccgcctgctcaagcgtaatgtcgcccagcggatgcggcgcgtccagcctctgggcgcgcagccgcgtcagccgggtggcgtcgtcttctccccactgcagcacaaagggatagaccagcccggcagtgtcgccatcgatggtgaagatccgccagcggatgatattgccctgcggatcgttgcgctggccatcgacaatcggtgacactgtcacccctgtacgacgcaactggtcataggtggcgtcgatgtcgtcgctgcgcagcgccacccgaaacagcgcctcattctccggcagcagccgtgcggcgtcgcgcgaaaggaggaatttgtccgtcgcggcgcgcagttcgtccgggtcggcaatggcgaggaattcgatatacgtcaggccaaaatagctcagcgcattgcgggttccccaccccggatggtgcccaccggccaccgcccacagctgctgcccggcaaagatttcaatcgccgcttccggctgattcacaaactgtactgcgtggtcccactgcaaggttgccatgatctctcccgcgattgtgcctggtcaggcgcctgcggcaaaagatagtgctggggtgaagggaatggcaaacaagaattaaatatatcgaaagcaggataagtgatttatatcaacgcggtatgtcgcatctgacaggcgatgaaacggcgggcaaagaaccgcccgccgcggggtcagaccgacccttctttctcaatcaccagaatacgcgccgccccctgcgggtgagcgacatgctcgcatcccaccccggcgtagaagatatcgccggcgtttagcatgatgatctgctcctcgccgtcgactttcacatgcatcgccacctgaccatccatcacggcaaacacctcctgaccatcattgatgtgccagatatagggttggtcggtccagtgtagacgcacggtggtgccggaaaaattggcaatatccagcgcgccccacgcgcggtcggcggtgaaatctttactgctccagctctgcatgatggtgtcctgtggtaagggttattttttctgccagtttgcccagggatccgctttctccaccggcgcgtcatcatcaagggaggcgagatacatagcctccacctctttgcgcgcccacggcgtccggcggagaaatttgaggctggacttaatgcagggatcgcttttaaagcagttaatgttgacctggcgggccatttccgcccaaccatagcgcgccaccagggcattgagcagcgcttccagcgtcacgccgtgcaggggatctttcgagctgtgcattacgatacgtccgttccgcattaaaaagtgcgcctaccttactggctctcaccgacgggcgcaacaggcttcattacgcgcttcgcgcctatatctatttaacgcaaaagcactgaaccccgcgcggtcataaattagaaaataacgttattggttgcttatttggccttgaggcaagctgtgttcagccccggacagaggaaatcaccatgcgctgctgttgtgcccgaacccagaacctgaatcaacccataacttattaccccgttttcggagaacacaatgaacgcgaccaccctgccgattctcgatctggcccgctacgcggaccccgcggataaagcggccttcctggccgacctgcgtcatgccgcccgcgacatcggcttcttctatttgatcaaccacggtgtcgacgacgcgcttcaatatgaagttcagcgccagtcccagcgcttttttgctctcgatgaggcgcaaaaacagcaggtggcgatgatccactccccccattttcgcggctataaccgcgcggcctcagagctgacgcgcggccagcctgactggcgagaacagtttgatatcggcgccgaacgtccggcgctaaccctcagcgacgacgccccgcgctggcagcgcctgcagggtccgaatctgtggcctgccgccctgccgtcgcttaaaccggtattacttcactggcaacagcaaatgacccaggtgggcatccgcctgctgcgcgcctttgccgaagccctgcagctaccggagaatgctttcgatcagctctacggcgacaaacccaacgagcatatcaaactgatccgctaccccggccagcaggagacccaaagcagccagggcgtcggcgcccataaagattcgggatttctcagcttcctgctgcaggacgagcagaaaggactgcaggttgaggtcgcgcctggagaatggatcgacgccgtgccgctggccggcagctttgtggtcaatattggcgaactgctggagctggcgaccaacgggtatttgcgcgctaccgtccatcgcgtggtgtcgccgccggcgcagcagcagcgcctctccatcgccttcttcctcggcgcccagcttgacgcggtggtgccggtttacaccctgccgcccgagctggcgcgtgaagcgcgagggccggacagcgacccgcacaatccgctgctgcgcgatgtcggctggaattatctcaagggccgtctgcgttcccatccggacgtggcggaacgctactatcaggacgtgtttcgcgaacgcgccgagcaattgatcgtttaaccataactaaaaaggaacacaccatgaaatatgccgcttttaaactggcaggggtcgcactgtctctttctctggcatggacgtctgcccaggctgccgcgctgcgcgtcgccgcggacccggttccccacgcggagatcctcaactacatcaaaaaaatcgatcccagcctcgatctgaaggtggtggagctgaccagcggggtcaacgccaatgaactgctggccagtggcgatgtggatgccaactacttccagcatgttccctatctgaaggatcaggaaaaagcgctgggtaaaacctttgccgtcgcggccaccgtgcatattgagccgctggggatttactcgcataagcataaagatttctcatcactgccggaaaacgccaccgtggcggtgccgaataacaccaccaacctgagccgggcgctgttcctgctgcaggcgcagaagcttattaagctggaccctaaatttaccgacccggccaccaccctggcgacgccgaaggatattgttgagaacccgaaacacctgaagattctggagattgaatcgccgcagatcccgcgctccctcgacgatgtcgacctggcggtgattaacggtaactacgcgctggaagccggcctggtgccagcgaaggatgccctggggctggaaagcgccgagcataacccgtacgccaatattctggtgaccaccccagccctggcgaatgacccgcgcattaaggcgctggcgaaagatctgacgtcaccgcaggtggcggagtttatccgtaaaacctacaacggctcggtgatcccggtggcccctcagtcatgataaccatcgaagggctgagcaaaacctacgccggaaccggccgaccggcgctgaacgatatcgcgttgcagataccgaaaggggcaatatacggcattctcgggcgcagtggcgccggcaaaagtacgctcatccgctgtctcaatttactggagcggcccacctcgggccgcattctggtgaacggacaggatattacccagttgaacaaggcggcgctgcgggattatcgcctgcgcaccgggatgattttccagcacttcaatctgctgcatgcccgcaccgtcgctgacaacgtcgcggtgccgctggagattgccggagtgccgagggccgctcgcgaggcccgggtgcgcgaactgctggcgctggtggatctcagcgaaaaggccgccgctttcccgtcacagctttccggcgggcaaaagcagcgcgtcggcatcgcccgggcgctggccgcccggccggaagtgctgctgtgcgatgaggcgaccagtgcgctggatcccgagaccaccgcctcggtgctggccctgctggcggatattaaccagcgcctcaatctgaccattgtgctgattacgcaccagctggaggtggtgaaaaccatctgtgaccacgcggcgctgctggaacagggcgagattgtcgaaagcggtaaacttgccgacctgctggtgaccccatggtcgcggctgcgccagtcgctgctgcacgacccgcaggctgaacaggaatttcttacccgccacggcgttcaggggaggccattatgcggagtagcatgagctgggaagatttgtggccgttattactcgacggcacgctggatacgctctatatggtgggcctggcggccctgtttacggtgctgatcgggctgcccaccggcgtgctgttgtttatttcccgcgccaacgggctggcgccgatgccgaaactgaacgcgctgttaggcgcggtgatcaacatcggcaggtcgctgccgtttatcgtactgctgatcgccctgatcccctttacccggctgatcgtcggcaccacgctgggcagcaccgccgccatcgtgccggtaaccatcggcgcctttccgttctttgcccgtctgacggaaaacgcgctcgacgaggtggactacgggagaattgaagccattctgtcgatgggcggcaacgtctggcacgtgatttttaaatccctgctgccggaagccctgccaacgctgctggccgggatcacgctgaccatcgtgatgctgattggtttctcctccatggccggtgtgatcggcggcggtggactcggcgacctcgccatccgctacggctatcagcggtttaataatgaagtcatgtttggcacagtgctgatcctggtggcgatggtccagggggtgcaaatggccggcgatcggctggtgcgtagcctggcccaccgccgctagccgtcagtcattagttccagccgctctctgccgccagctggcggaccagagtggcggcgtcacactcgcggatcaaccccaccccctgcccggcccagtgggcgccatactcatggacaccctgggctttcgcggcggcggccagtgctttgccgatatcatacgccagcggataatccggcacggcgctcgccggatagccttcccccagcgcacagaaggcattcgccagacagcgtgccggacgcccggatatcgcggaggtcagcaccgtacgcccgtcaaggctgttgtggatcgccgcgcgatagccggcgtcggcggccgattcaggacacagtaaaaacgccgtaccgagctgtacgccctgcgcccccaactgcatcacgctggcgatccccgctccgtccatgatgcccccggcggccaccaccgggatggttagtcgacgccgcagaagttgcaccagggtgaaggtgctcagctgagaatcaggctcctgcggagcaaagatcccccggtgcccgcccgcctcatagccctgagcgaccaccacgtcgatcccctgctgttcaatcagcagcgcctcctggagcgaggttgccgtcgccagggtaacgatcccctgccgccgcagacgctggatcgtctcaccttcaggaaggccgaaatgaaagctcaccaccgccggcgagatgtcgagaagcagctccagcatcggcgcatgaccgataaatgtctggtagatctcgcttaacgaatccggtggcgtactgccatagcgggcaaaatggggacgtaatgttgttgcccagtcggcttcccgccgggcgtcgcgccggggcggcgcatggcagaacagattgacattgaacggacggtccgtcagctggcgggtggcgactatcatcgcttccgcctgggcaacggttgaagcgcccagccccagcgagcccagcgcaccggcattacttaccgcggcagccagcgcgggggtggagacgcccgccatcggggcctgaatcaggggataatcaatatcaagaagcgaaagcagcgggttgctcatggtttcctcatgcattaacgatgctggaggcttaccatctcctttaaagatggtaagatcaacattattatcgtattgagaagaaaaatatgaaccacagcacactcgagatcttcattcaggtggcagaaacgcagagcgtcacccaggcagcaaaacggctgggccgcgcacagtccaatatcacgacccgcattcagcagctggaagaggagcttgccgttgagctcttcgttcgcggcaacaaaaaaatggtgttgtccccggcaggcgtgcagtttctcagctatgcccggcggatcctgagcctggcggaagaggcaaagcaggctctgcatccgacaaccccaggcggcagtctgcgtctgggcgcgatggaggcgaccgccgccagccggctgccgccgctgcttacccgcttccaacagcagtgcccacaggtggatatcaccctcatcacccaaccgacccgccagttaaccgagggggtgttaaccgccgcccttgatgccgcgctggtctgcctgccgccaggggccgatgggcaacctgcctgtcccgccgagctggcattcaccccggtgttttatgaaaccctgatgctggtccgtccgcagacccctggtccgctgcggttcgcggcatttgccagcggctgcagctaccgcgcgctgggagaacgctggctggcggaacagcaggcggccgtggaggtgcatgaggtcaattcctatcacagcatgcttgcctgcgtggcgtccgggcgctacgcctgcctgctgccgcagagcgtgctgtcgctgatgacgcttcccgaaaactgccttagcgaaccgctgtgcgaggcgaccacccagcttatctggcgcagcggcttgagcgcccccgccctgagcgagtggcgcaagctgctgcaaagcgtggcgattggctaagcctggcgttcggtaaagaccagccctgcggcaatcagcagcgccagcgccgcggcatagagcgccgggttaaatgaagccgcgatctgatacagcgcgccggcgataagcggcccggcaatctgtcccacaccgtacagtgcagtcatcgcggcaatcatattgaagctcacctgatggctgagacttttcgccttcggtagcgcaatggttacggtgcccataaaggtaaagcccaccaaaagcgcgcttagcacgcaaaacagcaatgaagcgctgcaggctggaaggatcacgccaagcgcctggacgagcaggttgcgggtcagcgcttgccggtatccccactttagcaccagcttatgccagatgaggcaggacggcgcggccgccagaccaaacagcgcccacagatggaccgggtcaacgctctgcagcgaaccggacagaaacaacggcagataagtggcggtgatgatatagccgaagcccgccagaccgtaaaccatcaagagtcgccacgccgcgtgacgggtatcgctcccggacgcaggcagggaggtctcaacatgggaaaccctcaccagtgcagccggcggagtcagtagccaacggatcgccagcgccagcagcagaccggcgcataatgcgcagagcagccagatctgctggctggtgaggttcagggcatgtccaagggcgatcccctccgcggagataaatatccccagccccaccccggcatacagcaacggcgccccgtgatgatgccccatatgttccagcagccacagcgaacctgcaattagcgttatcgcgctcagcgcgccggcgacggcgcgcagcgtaataatggtccacggcgagctcacccaggccagcagcgccaggctggcgatggtcaacccggcggagataatactcagtcgggtggcggccccaggctgcacccgcgccagcagcaacgcaccgaccagatagccagcgtaattggccgacgcggcgagattgccctcgtgcagggttaacagaccttcattaagcataagcggcagcacgccggtgaaggcaaagcgcccgtagcccatgccgatcatcagtactatcgatccagccagtgccagccataaggcctggcgcgattggttattcatccaccaccccacaatgattctcaatttaagaataataagattgaattattctttttttattatgatgaagaggtattgttggcgcaaggcggatgttaatccgctatggtatttacagagagaaggtggcgcctgggcacggcttaacacacgccgggccgatttaccggtacagtatcaactcaacttatgctcacgggagtcattatgtcgttctgtcatatgcgcattgccaggccggtcagtgaactggacaccaccgccagcatgtattgcgccgggctgggactcgagcagctcggcagctttaccgatcatgaaggattcagcgggataatgctcggcgcgcccgaagcgggctggcatctggaattcacccactgccgccaccatcccgtcaccccctcggcaggcgatgaagatctgctggtgctgtactatccgcagcaggcggcatgggaggcacagtgcgcagccatggacgccgccggatttctgcgcgttacggcgtttaacccttactgggaggtcaatggcgtcactttcgtcgaccgggacggctaccgcacggtattgcaaaaccgcgcctggggcatggtgtgtgattcgtcgggtatggcggcgagctgacgctgagcgaggcgggcgttaagcgctgtaaaagcagttatttacattcgtacaaatatcgttcccgtcggttaccgataaaacgctgtcgcgcctcgccagcgccctcacggcgcgctatgctacacatcccgttgtattaacctcttatccctatgagcacttccgtcagcactacacaactcaatttgcgcattatttcgatcgttgtttttacctgtatctgctatctctccattggtctgccgctggccgtactgccgggctatattcactatcagctgggctacagcacctttgtggccggaattgtgatcagtctgcagtacatatcgacgctgataagccggccgcacgccgggcgctataccgatatctgggggccgaaaaaagtggtcagccttgggatcgtctgctgcctgctcagtggcgccttcacgctactggcggtagtcctgcaggcaacgccgatgctggccattgccgcgctgctggcgggccgggtgtttctcggcgtcggcgagagctttaccgccaccggcgccaccctgtgggggatcaaaaccgtcggcgcgatccacacgtcacgggttatctcctggaacggcgtggcgacctatgtggcgatggcgatcggggcgccgctgggagttaccctcaatcactattttggcatcagcggctttgctacggtggtagtgctggtcgcggccatcggtctgctgttcgctcgtacccgccaggacgtcaaggtgaccgccggcgccagagcgccctttcacgcggtggtgcgaaaaatctggccttacggcctggggctggcctttggcaccgtcggtttcggcgttatcgccacctttatcaccctctacttcgccgcgcacagctggcagggcgccgcgtttaccctttcgctgttcagcgtcggctttatctgcgttcgcctggtgctgggaaataccattacccgctttggcggagtcccggtctccctggcctgcttcatcatcgaaagtctcggcctgctgcttatctggctggcgccatcagcatggatggccggcgtcggcgcctttctcaccggttcgggtttctcgctggtctttccggccttaggggttgaggcggtaaaacaggtggaagagcaaaatcagggaaccgccctcggcacctactcggcgtttcttgatctggcgctgggcctgaccgggccgctggccggctgggtcgccgggttctacgatctcgccacgctgtatctgctggcggcgatcgtggtggcgctcgcattcctgctgattttccgcgtacatcggcaacagcggcttgtcgccagagagtagtgtggcccggctcgcgggctgccgcggtccgatgacgccggcaaaaaatgaatcggcaattgacgacgattcggcttccgtgccaacatcccgtcagcgtctggcaacagatgcatggacggtactggtagacaacagagttcgcgcaacgatccagcccggtaccgtagtccaatccgaatcactgacccacacggtgaattcctgattctggcgggaaacacagacatgcaccaaagttttaatcagcgcgttcatttctattactgcgtcctggtcgcgctgaagatgcacggaaaatcgaaaaaagcgggtggtatcaggggaaagaataactttctgctgaaatggctgcgccgggcgcaggataacaacatttttcctcccgatatcaccagtgaaatcgaatggctgcgaggaaaaattattcaggctggctatgacaccgatctcgagccgatgctggattttgtctacgccaccgccagccgcgccgaggcgctcaaaaacgccgaataggctcttgcgcccgccacgggcgcagagacgttccctgccatgtctcaatcccaggttcggccaacagcgcaggcgcaatccagccacgttctattttgtgacactgtcacgcacaaaggtgaccgctgaggttcattaaccgctgacatgccgcctgacgcgttctatgctttaccctgtctccctcctcacacaggaactgcacccgatggccgactggaatccttcgttgtatctgcaatttgacgctgaacgtacccgccccgcggccgacctgctctcgcgtattgcccatctgcaggtcgagcacgccgtcgacctcggctgcgggccgggaaacagcacccgcctgctacgcgccgcctggccgttggcgacgatcgtcggtatcgataactccccggccatgctggtccaggcggcgcaggccttacccgactgcgaattccttgatgccgatattgcccgctggcggcctgcgcaaccgccagatgtgatctatgccaacgcctctctgcagtggctgacggatcatgagacgcttttcccccatctggtaaaccagctggcggacaacggaacgctggcagtgcagatgccggataactggcaggaaccttcccataccctgatgcgtcaggttgccagcgagatggggttgccggaccgtggacgccagccgttactcccgcccgccgcctggtacgatctgctcagccgccagggttgcgaagttgatatctggcgcaccacctattttcatccccttgcttctcatcaggcgattgtcgactggctgcagggcaccgggttacgcccctatctggcaggcctggacgagcaggccggaagcgcgtttctcacacgctatctcgcattgctggccgcacactacccgttacagtgtaacgggaaggtgctcctgcgtttcccacggctgtttatcgtggcgcgaaagatcgccgcctgaccgttgggataggtgggcagaaaagcggagtgatgaaaggtgtaaaggaacggctataccatcctgattttcaggattgataatcccgaacgttgcgatattcaatatcttagtcagcgtgcgacagtgatgactcctttaacctgcaaagagaatcactatgagtactcctcctgtcgatcgccgaacgctggctgctatcgccccaaagctagccgagctgaccgaaacggtgctgtttggcgatatctgggcgcggagcgagctgtcgccccgcgaacgcagcctgatcaccctttccgccctgacggcgcagggcaaaactgaacagctgccgtggcacatcgcgttcggctatcagaatggcctgagccgggaagaaattgtcgaattgtttacccatctggcgttctatgccggttggccggcggcggccagcgccctgacctgcctgaatgcgcaggaggcgtcatgcccctgacccgaatttcgcttggcaccgcctggcgtcccgcggagtttgctcaattgtcggcgctctttcatgagtgtctggtggcagagttcgacgttccgtcagcagatagatttcagtttatcgaacgggccgccgatgagcagcgcatttacgacccgcactacctcagcgaaggacgcagcgcccgcttcgtgctgtttcatattttcgccggaaaaccgcgcagccgggcgcagaaacagggactctatcgtcggctctgcgcgcggttagacgatgagatggcggtcagcccgcaggacgtgatggtggttatccagtttaaccaactggaggactggagttttagcgcagggaagatggcgggtgaatgagacaggcggcgccgcaagaggcgccgcgtttcagatgatatactttactaccacgcgagatgatgcaccagcgagagatcccaggccgttgccaatagcgaaagaaacataatcacattgaccactgtttcaagacgtttttccatcgttacttctcctgagcctgtttcccctgttatagcgggaaaagcttaacaacctcttaccgcttcaggactcaagcgtgatcctgtagcgtacgtaatcgtcagccggggtaaactcatcatacagatgacgggcgggattatcacggcgcgtatgccagtacagccgcgaccagcctttgtccgccccttcgctttgcagcgacttaatcatggttctggcaataccctgtccacggaaggcgggatcgacaaacagatcctccagatagcagatcggcgtggtaacccaggttccctcatgaagaacacagatagcgaagccgaccaccgcatcatccaccaccgcgactctacccaatacagacgagtttacatccagcatccgctgccaggtgcattcggtcacctcttccggctgcgggctaccgtaaaaacgagtgtagccttgccaaagctgaagccattcggctttgtcgtggggccgtacttcccggatatcgatgaccatgagagtttccttacagatgaatgcattagcctgcgaatattggcaggagatatgagttgaggtcattattttcctgcgcagatatttgttcaagcgcttcggccataattctcctgctgttcggaacgatttggcactaaaaagccgaatgcagaggagccactgaccggctgttacaggttagtataatagtatgttgtaactaataaaaatcctgcacaacccggccgcagccgggtgtatagatggactatcagcaaagaggtttgacggcgtcgcgcataccgcaggtcaggatagcgtcaaggtcggcagtcaccagctccaccaaccccgggatctggctcagatcctgctgccagtgatccgccacgctgagcacggcggtgaccagctcgcgagtgctcatctggccatcgcgatggcgggcccacagcgtttgatagcgcgatatccagtcggcgtcatcctgtactggatagctctcaccatcccgctctccccggtaaaaggcgatcagcgccgccagggcaaaggtcagacgcggcggcagcgcgccatgcgctttctgccccgccagcagctgcggcagaatacgggtgcggtacttggtcatgccgttgagcgcaatcgagagcagctgatgtttaatatagggattacggaagcgccctgtcacggcgctggcgaatgacaccagctcatcgcgcggcagatccagcaccggaataatctcgtcataaatcgctttttcgacaaacgcgcaaatctccgcatcgttcatcgcctcacccacggtgtcgatcccggcctggaaggccaccggcaccagcgcggtgtgcgccccgttgaggatcgccactttgcgctctttatacggcttgatatcgtccacaatgcgcacattcagcggcagtttatcgagacgcagctcggccgccagcgaggcaggcccctggataacgaacaggtagaaatgctcagcggtatcaaggaaagcatctttatagccggtctgcgcctcgagagccgccacttcatcacgcggatagccggtcacaatgcgatccaccagcgtcgaacagaaggtattcgctgaggtcagccaggtgataaatgcctgcggcagttcccattcgctagcatagcgcagcaccagcgcctgcagcgcctcgccgttataatcgatcagctcgcagggaataatcacccatcccttgtcggccgcaccggcgaaatgctggtaacgctcaaacaacagacgggtcagtttcgccggataactgaccggcggcgcgtcgtcaaaccgatccccggcatggtagctgatgcccgcctcggtggtgttggagaagacaaaccgcatctccgggttatgcgccaggcgtaaaaaagcgtcgaagtctgcgtaagcgctgatctcccggttgaccgagcggataagacgcgcatcgctgaccgcttcgccctgctcgttcaggccgcgaataatagtcgtgtacaggccatcctgggtgttcagcgaaggcggaaaatctgtggcgataggccgcacgaccacgatgcccgcattcaggtcggtatgctcgttgagcaggtcgatctgccagtcaacgaatgcgcgcaggaagttaccttccccaaactggatgatacggtcagggtactgcgcgccggggaaatcacgacggtttaaagttttcacaatgggttccctctaatagtagtcatacaacctgagtaattggtccaataagttatcaggttttgctaccagtgaaaccctgttttgatcaaagcaatctgcaatagcggccgtcagggcagaaacttatagaatagtgaggtggcagtcatttcgccgtcgggcatcagcgcatagcgcggaatttcccccactttttcccagccgcagcgggcatagaactgttccgccccgctgccggtcgccgtgtccagcaccagcaccgtcttcctttcccgccgggcaatgcgctccagctcgctcatcaatgcctgggcgatcccctggcggcggacattttggtgaaccaataatttggcgacatccgctcgatggggctggttttccggttgactggtgataagttgcacggtgccaacgggacgttcctccgcgtcgaaggcggccagcacaatgcgctccccggccgccacgctgtcggcagtgcgttgccagaacgttatcgccgtttgcggcgcgaaaggcagcataaagctcaccgaggcgccgccgttgacgcagcttgccaggatctcgcttaatgccgggaggtgatggagaatatcgtcacgcgagagcgtgcgcagtgaaaaggatgtggtcataaaagctccctgttatcgaccacatcactatgtttttaaccaaaaattagcacaagtaggatcccgataggattttcttatggcgcgctttcggtcagcgtcggcatacaaatttggttacgaccgctctgtttggctttcaccatctcatcgtccgccgccaacagcagctggttaaacagctcggtgatgcgggcgtggcctacctcgcgcgtctccagtcccagactgatggtcaggtggatcgggttctggcccaggccgaaaggctgcgactccaccccgtgacggatcttttccgccagcaaatagccctgctgggcgctgtcgacgacggcggccaccgcaaactcttcgccgccgatacgggccaccatcccctgctcacccaccagctgtcgaacctgctgggcaaactgggtcagcacgcaatcgccgccttcatggcccagagcatcattcacccgtttgaagccatcaatatccagcaccatcaccgtcagcagcttatccgccggcagcgtctgacgcttcaacgcttcgctcagtccggaacgggaatagacgcgggtctgaaagtcaaaatcggcgcgcagggccagctgcttcaccagcgtgttaatcgcttcgacactggatgcgacaatcaccgggctaatcagcatggcggcaattccgaggcgggtggagaacagctgccacggctgcattcgcgcatctggcgaaaagtgaattaacgaattagcgaccagcagtatttcgccgatgccagtgagaaaagtcagcagacaggtcagcggcagcggatagcgtacagcgcaccagatcaaagccggtaacgggaaggtaatgctgcccgcgccgcctaccgccacgccaagcgcaattgacaggaccagcgccagcaccggcagcagctggcgaaagcgaaaaccgcttaatgccgaaggcagcgtcagggtcagaataaagggcaggattaataccgccgtcgagaactgttcgctaaaccagtccgccagctggggaacgaaggtggcgcgttcaacatccaccgaccccagcgcgccgaccgctgcgcacagtaaggcggctaacaggcagaaacagaataaattaagcgcgtttatcgggcccggcatggagtcggcgcgacgtttatcccacagtaccagctgcgccagcgtcacaataaagacaatattggaaaagttaatcagcaatgaggcaaagcccattccccagcgcgaggttaatccgtcatagaccagcattgccgcaaaacagacggcataaaaatagctgcggttaagccatacatagcgtgcaaaaatcccggccatcactgcattgagcggccagaagaaagagagctcctgcaccagacgcagcatagcgccaagaaaatgcagcagtagcgttaacgtaaataagaccaatgcatcgcgcacgggttgttcttcacgaaacagcgtaaatgaccgaatcgacagtgaagacattcagtaattatccgtctaattgtttcaggaaattattatgttaatagttagttagcggattatcataacatgagaatatttatcaggcatactccggcgccgatcaaatgcaaattagcgcacagacggcgcattcatttgtagcaccagccagcggtggatgacctgcacgatatagtcctgctccggctcgctcagcgcgcggccgtggggaatggcatgccatttttccaggcagccgcgacagcaggtagcggtcgcgtgctgggcgataaacaccgggtgaccgcgcatcggcgtctgcttgccatcattgatcggcgcagcgggcgccagccgctggcgaataaagtctgcggcatgccgatcgatgatctccggtcccttatcgagacaatattgccgctctttcccccccagacggaagcgtgagcgaaacgtcgagcgcgccaggcgcgcaaacaagcgatcctgatcaaccatcagaacaccgacctccccatccgctgagtcagtttttccagcatcgccacgccggccagcgagttcccggcgtcgtcaagctccgggctccacacggcgatcgccatctcctgcgggacaatcgccacgatcccgccgccgacgcccgatttcgccggcaggccaacgcgccaggcgaattcaccggcgttctggtacatgccgctggtcatcatcagggcattcacctggcgggactggatgggcgcaataaccggcgcgtcgagatgcggggcaatgccgcggtcggcgagaaacagaaaggttcgcgccagctcaacgcagctcatctccagcgaacagtaatggaaatagttctgcagcacggtggcgacgtcgttatggaagttaccaaaggatttcatcagccaggcgatggcggcgttgcgcgccgaatgctcaaactctgagcgagccaccaccggatcgtaggcgatatcggccacgccgctcagacggcggacaatctccagcatccgctgacgcggggcgctgagccggctctgcagcatgtcgcagaccaccagtgccccggcgttgataaacgggttgcgcggtttgccctgctcgatctccagctgcagaagcgagttaaagggctggccggaaggatctttccccacccgctgccagatctcctcctcctgatagtggttcatggccaccaccaggctcaataccttggagattgactggatggaaaaacgttcatgggcatcgccagcggcaaagtgctgaccgtccaccgtactgatcgcgataccaagcttgtcgccgctgacgctggccagcgccggaatataatccgccacttttccgcggccaatcagcggcctgatttctgccagaatggcttccagcattgcattattgattaccgtcgccacacgcggctccttgcccaccatcaaaattcggtgggcgagtatagcagacgtggacgacggtcgtcaggggctaacgttgattagcgacggtctttccagacggtctgcgcattacagaactcgtgcaggccaaaatgcgacagctcgcggccaaaaccgctcttcttcacgccgccgaaggccacgcgggcgtcgctggcgcagtagccattgaggaagacgccgccgcactccagctcgcgggcaaagcgctgggcctgcgcctcgtcggtggtatagaccgtggcggacaggccaaactcgctgtcgttggcgagggccagtgcatggtcagcgtcgcgagcggtggtcagggttgctaccggaccaaacagctcctgacgaaagccggtcatcccggcggtgacgttgcccagcaccgttggcgcatagtagttgcccgccccttcgattttttccgcgcccagcagcagagtcgctccttcatcaagggtcgccgttacctgctggtgcagttcatcgcgtaaatcgaaccgcgccatcggtccgacgtagttttgctcatcgcgcgggtcgcccatcttcagcgccgccacggcgtcgacaaatttgcgggtgaaggcctcggcaatgccggcttcgagaataaagcgtttcgacgccgcacacacctggccgctgttctgatagcggccggtgacggcggctttcaccgcttcatcgagatcggcatcgttgagcacgataaagggatcggatcctcccagctcaagcacgcatttcttcagcgccgcgcccgcctgggcgccaatcgccttcccggcgcggacgctgccggtgacggtcaccgccgcgatgcggtcgtcattgataatctgcgaaacgccgtcattggtggcgttcacccaaccaaatacaccatccggcaggccggcggcggcaaaaatttcgcccagcagaccggcgctgcccatcacgttcggggcatgcttcagcagatagctgttgccggccagcaggatcggcaccgcgccgcgcatcacctgccagaccgggaagttccacggcatcaccgccagtatggcgcccagtggacgatactcaattaccgcctggttattttccaccagggtagcttccgtcgccagcatcgccgggccgtgttcagcgtaccagtcgcagaggttggccgatttcgccacctcgccgcgcgcctgagcgatcggcttgcccatctcaagggtgatcatctgggccacctcttcaccgcgggcgcgcagcgcggccccgatgcggcgcagggcgtcggcgcggtcggcaagcggcgtctgacgccactggcgatagcccgccgcggcgagcgcgatcgccgcgtcgacctcgcgttcgctggcccacggcagcgaggagaccacctcaccggtagtcggattgacggagacggcgtgcgttgcagataaattcatcattattctctctcgttgcttgcgaagtgtccgtattctggcttacctttccattcattgaaaatgaataatattaagcaacacattcacaaaagaagaatatcatggacctgactcagctagagatgtttaacgctgtcgccagcaccggcagcattacccaggcggcgcagagagtgcatcgcgtgccgtccaacctcaccacccgcatccgccagctggaggccgacctcggcgttgagctgtttatccgcgagaaccagcgcctgcgcctgtcgcctgcgggacacagttttttgcgctatagccagcagatcctcgccctggtggacgaggcgcgaatggtggtggcgggcgacgaaccccaggggctgttttcacttggttcgctggagagcaccgcggcggtacggatccccagcactctggcccactttaatcagcgctacccgaaaattcacctggcgctctcaaccggcccttccgggacgatgatcgacggcgtactggaaggcgccctgagcgccgcgtttgtcgacggcccgctggtgcatccgggcctggaggggctgccggtgttccctgaagagatgatgatcgtcgccccctacggccacgcacccatcacccgcgccagcgaagtgaacggggccaacgtctacgcctttcgcgccaactgttcctatcgccggcattttgagagctggtttcatgccgacagagcgaccccgggcaggatccacgagatggagtcttaccacgggatgctggcctgcgtcatcgccggcgccggcctggcgttgatcccgcgcagcatgctggagagtatgcccggccatcagcaggtttccgcctggccgctggccgaagaatggcgctggctcaccacctggctggtgtggcgccggggcgccaaaacccgccagctggaggcgtttatagcgctgctgaacgaagatcggcaaacagtggtttctccataaacacgctgagcggatcgggttgatacggcgcaaacgcgcagcgggtctggtagccgttgcgcgtgtagagggcgatggccgcatgctgatggataccggtctccaggcgcagggtatggcagtcgcgctgacgcgctttcgcttccagcgccgccagcagcttttctcccagctgctggccgcggtgctggggatcgatatagacccgcttcatctcgccaaagccttcctcactgagaacaatagccccgcagccaacggcctcgccctgcgggctgcggatcgccagggcgatgaccgtctgcggcggcagctggctaaggtccagcaggtggttgctctccgccgggtagagggtctcctgccaggcgtcgagggcggcaatcagggcgataaattcggcgtcggtaggggcgatgtcggtgatggtgtacataggtgagctccttttttaccccactgtagcgcggccggcggcttttcccgacatagcattaacttatattgccgcccgcctattgcgctaaccaactgaaacacagtaattttatcccctgctgttcgtacttgagatctgaatatgcacaccaaagcccgtaaagtgatgattattggcgccggcaatgtcggcgcgtcggcggcctacgccctgctcaaccagagcatttgcgaggagctgatcctcgtcgaccttaaccaacagcgcgctgaggcccacgctcaggacctgagcgacgccgcggcctacctgccggggatgatgaccatctccacccgcgaggccagcgactgcgccgatgtcgatatcgcggtgatcaccgtctccggcggcgcgctgcgccccggccagagccggctggatgaactgacctccaccgcaaagattgtgaagagcattgtgccgacgatgatggccaacggatttaacggcatctttctggtggccaccaacccctgcgacatcatcacctggcaggtatggcagctttccggcctgccgcgcagccaggtgctgggcaccggcgtctggctggataccacccgcctgcgtcgcctgctggcgcaggaactggagattggcgcccagagcatcgacgcctttatcctcggcgagcatggcgatacccagtttccggtgtggtcgcactcctcggtatatggcacgccaatcgccgacctctaccagcagcgcaccggcctgccgctcgatcgcgaggcgatggctgacaaagtgcgcaagctgggatttgagatctacgcgggtaaaggctgcaccgaatatggcgtggcagggaccatcgccgagatctgccgcaatatcttcaccggcagccaccgcgcgctggcggtctcctgcattcttgacggcgagtacggggtcagcggcgcggcggctggggtgccggcggtgctggcccagggtggcgtgaagcagatcattgaactgcagctggccggcgaagagcaggcgaagttcagccagtcgatcgcggtgatcaaggccaatatcgcccgtctgccctgacggcagcctgcgagtcagtcggcaatgatcagctgcggggaaagggtctccagcgcctcgcgggttttatccggcaggtgggcgtcggtcacgatatcggtcaacgacgccagcggagcgatgttgaacagtgaccaagcgccgtatttggagctgtccgccagcaggatacgccgccgggcattggccatcagatcgcgcttcagggcggccttttcctccgtcggggcggtgatccccttctcaaggtcccagccgttgcagctgacgaaggcgagatcgggccagatggtctgcagcaggcggcggccgtgatcgccgatgcacgactggctgctgtcatcgatgcgcccgccgataatcgtcacttcgatctgcttaaattccgataggaacagcgcgatatgtaaatcgctggtgatcacccgcagcggcagatgggtgatctgccgcgccagctcaatcatggtggtgccggcgtcaagcacaatggcgtcgccggctttcaccagcgcggccgccgcactggcgatagcctgcttctcaagcggactacgctgggctttctccagcgtcgtcggctgggaaggaataaaccggttcagcgtcaccccgccgtgcgttcggctgatcaccccttcctgatcgagtttgatcaggtcgcggcgaatggtggccggcgaggcgttggtcgccgccaccagctggtcgactgtcaccagattatggcttttcaggaagtccataatctgctctaaccggttatatcccttcatgttattcctgcgcgatgtgcatggcgagctcaatggaggttgccatgctctcagacttcgctttacctgtccaggcaatatcaaacgcagtgccatgatccgcggaggtacggataaacggcagcccggcggtaatattcaccccgtcatagaatcccagcagcttcagcggaatatgcccctggtcgtgatacatcgccactaccatgtcgtacatgccttcgtgacactgcataaacaccgtgtccggcggacaggggccggtcacctccactcccttcgcccgcatggcggcgaccgccggggcgacgatacggatctcttcatcgccaaacaggccgttctccccggcgtgcgggttaacgccggcgaccgcgatgcgcggacgcggatagccgacgcggcgcagaaagcgatccgccacgccaatcaccgtctcaatccgcggctggtttagggtatcgaggaactggcgcaaggaaatatgggtagtgatatggataaccttaagcttctcggtatagagcaccatggcgtaatcggtagtctgcgtcaggtgggccagcagttcggtatggccgggataagcgtgcccggcgagatgcagcgcctctttattcagcggcgcggtagcgatggccgcgaccgcgccctccagcgccagcgcggtcgcccgcctgatgcagcgaaacgcgagatcccctgcctgggcctggacttcgccagggcgcagcccctgcgggtcgctgagtggttcatcaatgacgttgatggtcgctggggaaaaactcgcctcggcgggatggtcaatgatgcgcagctccgcccgcggcgtgatatttagcgccaggatccgccgcagcgtctgcgcgcagcccaccaccaccaccggcgcgccgctcagcgccccctcggcgagggatttgataataatctccggaccaatccctgcagggtcgcccattgtcactgcaatcatcttagacactcagtttctcctcaataaaattcacaacatgtaatagcgtggtgtcggtgccgaatcctccggctttggtcatcaccggccgcgaccagcggccgccgagaaaatgcccgtatggaacgcactccgccacccggccgcggatctgaaaccctgtggcgccgagcgcgtgtgcgacggcgatggccacatcgccgccggaaagatacagcgcgccaggggaagactgcgccaccgcctgcgccgtgacgtcggcaagccaggcgcagatgtgctccccgtaggcggcgcggctgagaccgcgttcacggcaccgggcttcaatcccgtgccgggcggcgtgattcgggcgggtggtcaccacgcagtgctggccctcacgcagcacctcggcgatccgtgaagcttcctccttcggcgatccgctaaaggtctgttcgacatcaatttcaatcacccgtactcgggaatggacctgcagcgcagcaacctgacgctgcgccatctcgctcatcgaaccgaccaccgccagcagcgggccctgctcgctgcggcgcaggcggcgagccagcgcctcgcagagacccgccgagccgaccagcagggtctcccgcgcatggggcgcaacggcgtcgatcacctggtccagatggctgtcttcccaggcgtcgacaatcaacactcgcttctcctcgcccgccgtcgctaatgccgccggaagctggccagcgttcagggtcagacagggaagacggctctgcatggcgataatttcgctaatctccgcccggctcaccggcgttttcggatcgctggcaaattcggtctgatcgaggggcacaccatgcacatagcagcgcccgtcccgggtatgccgcccggctgccggataagccggggccaccaccgtcatccggcagccttgcgccgccatcattgcctccagttcgccgccgggattaccgcgcagcgtggagtcaatcttctttacctgccagtgcgggacgaatgtcgccgcgccgcgcagcagagcggcgaccttgtccgccgccgccgcggcgctcatcgcccggctgtcgctgttgagaattaatgcccgggcggttgatggctgtccggcggtgaaggccacttccaccgacatacccgcctccgccaggctgaccccggcgtcattggccccggtaaagtcatccgccagcaccagcactctgttattgccgtcgttcattgtcctgccttgtagtcgataaaatcttaaattgattatattcaatcatatttgattaaatgtgagcaagctcaagttattaagctgccgtataaattataacttttccccatcagacgagtggcaagatttatgaatgattgaattcaatcaattactaccaaggagaaacgcgtggcgacgatacacagcacaatcatcagcggggctggcgcctcatcggccctgctcccgctgctggccggtaaaacctcaatcctgctggtgaccgacaagaacgtcggggcgctggaggcaacccaggcgattcatcgcctgctggcggctgaaggacgtgaagttgaggtcattgacagcgtgccagctgagcccaaccatcacgatgttacgcagatcgtcagccagctgggcgccagccagccgcagatggtcgttggtatcggcggggggagcgtactggatgtagcaaaactgctgtcagtacttctgcaccctgaggcgccctcgctgacgtccctgctggcaggcgagcagccgcaacgacgaatttgctcattgttaatcccggccaccgcgggcaccggatccgaagcgacgccgaacgccattctggcgatccccgagcagcagacgaaggtggggatcatctccccggtgctgcttccggactatgtcgccctgctgccggagctgaccaccagcatgccgcccagcatcgcggcgtcgaccggaatcgatgctctgtgtcatctgctggagtgctttacctccaccgtcgccaacccggtgagcgataacgcggcgttaatcggtttacacaagctggtacgccatatcgagcgttcggtaaatcagccgcaggatctgacggcgaagctggagatgctctgggcctcgtggtacggcggcgcagcgatcaactattccggcactcacctggtgcatgcgctctcctatccgcttggcggtacctggcacctgccgcacggggtggccaacgccattctgctggcgccctgcatgcgggtggtccgccctcacgcggtggcgaagttcgctcaagtctgggacctgatccccgatgcagatcgcacgctcagcgcggaagagaaatcccatgcgctggtcgcatggctggcggcgctggtcaaacgactgccgctgccggacaacctggccgcgctaggcgtgcctcaggagagtatttccgccctcagcgcagcggcgcaaaacgtcaaacgcctgatgaacaatgccccatgcagcgtcagccgcgaagagatcgcggccatctaccaaacgctgtatccagaacatgcctaacaggagaaagttaaatgaggaaagctattagcggcgtactcaccgccattgtcactccctttaccgccgagggagcgcttaacctgccggcgctacgccagcaggtgcagcgccagctcgccgcaggcaacggtattttctgcggcggcaccaacggcgagttttttgtcctcaatgaggaagagaagatcgccgtcgccagaacctgcgtggaagaggcggccggtcgcgcgccggtggtggcccatattggggaggtttccacccgggagacgcgccggctgggccagcagatcgcccgcctcggagttgacgcggtatcggccattaccccgtggttcgtgcccttgaagcaggaagagctgattaaccactatacggcgatcgccgacgcgctgagcgtcccgctctttctttacaacattcccgcccgcaccgggaacactattgccccggagaccgcgcgccagctggcccgccacgagaatatcgtcggcattaaggatagcgccggcagctacgacagcctgaaaggctttctcgacgcggtgcgcgatatcgacggtttcgacgttctgaacggaccggactcgcttatccatcagggatttgtcgacggctgctcggcctgcatctcggggcttgctaacgtcgcccccgctgaaattaacgccatctggtcgcgctttcacgccggggatatcgccggatcgcgccaggcccaggagcaggtaacgggcctgcgcaccgatctgtataaagtggcgttctcgcctgcggcggtgaagaaagccctgcagctaatgggtcacgaggtgggcgacagccgctacgcggtgcagtttagtgaccaccagctgcagcagatacgcgacatcatcgctcgttatttagcgtaatacttgctgcgcttttttaataaaacagaccgggtaccgccgtgcccaggattcgtacgcccagagagaggctaagatgaatcattttaccgctgaagatacctttattattgtcggcattgttattgcctatattctgtttaccacctggctgacattccgtattcgtagtaaaaattccggggattttatggaaggctcgcgcgccatgccggcctttattgtcggtatattactgatgtcagaatatattggcgccaaatcgaccatcggtactgcccaggccgcctttgagagcggaattgccgcctcgtggtccgtgctgggggcagccatcggctttccgctgttcggtttaatcctggtgaaacgcatctataacaccggaaaaatcaccatttccggcgccatcgctgaaaaatatggcaacagtaccaaaaatattatctccctgattatgatttatgcgctgctgctggttaacgtgggcaattacgtcagcggtgccgcagccatctccaccgtattaaaagtgaatttaccggtagccgcctttattaccgccattgtgagtaccttttatttcgcgttcggcggcatgaagggcgtcgcctgggtcaccatgttacacagcgcgttgaaatacgccggtctgctgatcattctgggttttgccctgtccaaaaccggcggcttctcgccgatgatggagaagatgccggattattactggacatgggatggcaacattggtgctggcacgatcttcgcctggctcatcggcactatcggctccattttttgcacccagtttgtcattcaggccattagctcaaccaaagacgttcggtcagcgaaacgctccacctggatcgccttctttttctgcctgcctatcgcctttgccatcgccattatcggcgtcgcggcgaaatacctgcatcccgagatcaacagcctgtatgccctcccggtctttctgcaggacatgaacccgtggctggcaggtctggtgacaacgtcacttgtggcatcgattttcgtcagcgtaagtaccgtagccctggccattgcctcgctggtggtgaaggatttttacgtaccatggcgcaacccaacgccggaccaggaattcagagccacacgctgggcgtcgctaattatcggcttcctgccgctgatctttgtgctgctggtaccggaggtgctgaaactctccttctttacccgcgccattcgcctctccattaccgtggtggcggtcatcgccttctatgcccccttcttcagaagcactcggggcgcgaatgccggcctgatcggcgcctgtgtggtgacgtccgtctggtatttactcggcgacccgttcggcatcaataacatgtatgtcgccctggcgaccccggccatcatcatggtgattgaccgcctgatcccaaataaatcacaaccatcccccgccccagttgagcaacgtggagtataaaacatgaccgtaattccgccttttgacggcgtcattcgccaacaccagcaagatgaacacatcgcatgggcaatgcttccctgcgcctgcccgcagaaccatgccgccaatctgctgccgctggatgacggcagcctgatgtgcgtctggtttggcggctcccaggagggaaaagccgatatttctatctggggatcgcggttagcccccggcagtgaccgctggagtgaggcggtcaagctatctgatgacccagaccgctcagaacaaaacccggtgctgtttcaggcgcccgataacgtgctgtggctgttgtggacagcgcaatttgccggaaaccaggataccgccattgtgcgctaccgcctctcccacgatggcggacgaagctggggggccatcgatacgctgctggatcagccgggtacctttattcgccagccaataagcgttatgtctgacggcaactggctgctgccggtcttttactgccgtaccgaacccggcgagaaatgggtgggtaacaatgacgtcagcgcggtgaagatctcttcagactgcggaaaaagctggcgtgacgtggcggtcccggagagcctgggttgtgtccatatgagtatcactccgcttccggacggcagactggcagccttcttccgcagccgctgggcggatcatatctggttcagccagtccagcgaccagggagagagctggtctgcgccggtaccgacgacgcttccgaacaacaactcgtccattcaggcgacccccctggacaatggtgaactggcgctggtgttcaataatatgagcgccgccggcgccacggaacgccgcgcctcgctgtatgatgaaattgctgacgacgatggccgtagggagccggaagcgaccgggaaaagcgccttctggggcgcaccacgcgcgccgatgaccgtcgctatttcagccgatggtggtgaaagctggccgtggctgcgcaatctcgatgagggtgacggctactgcatgaccaataattcggagcagaagctgaaccgggagttctcctaccccagcatcaaacagggagcagacggtaatttgcatatcgcctacacctggtatcgccaggcgatcaagtatgttcgtgtctcgccacagtgggtaaaaggagaaagcgcatgattatcggtaatctgcaggcgctgcagcaggctggtctgccgccggcgttaaagcagctattgagcagcgaggcctgttcgctggccgccctcagtgccagagagaatggccgcttccagcccgacgatgcgccgtggttctgcaccctcagcgtggtgcaaacccagcctgcggccgagcggcatacggaatatcatcgccagtgggcggatgttcaggtcatcctggccggcgaggagcgcatccaggcgggcatggctcccgcgatgcgcccggaagatcatgagcttaagcccgacctctatatatgtcagccggccccggagagtgtctctattctgctgcgtcccggcgacttcgcggtcttttaccccggcgaaccgcaccaggcgctgtgtgcggtttcgacgccagcgccggtcagaaaggcagtattcaaaatccccgctgagatgctggaggcgcgatgaagcgggcaatggtaaccggggccagctccgggatcggcgccgcagtggtgaggcagttgctggcggacggctggcaggtgatcggcatgagccgttcgctgccgcccttctcacagccgaactttcgccatctgatggtcgacgtcagccaacgcagcgcgctgctggcggcgctggagcagattgagccccctcaggccatcattcacgccgcgggttcaatggcggccgccaccctgggtaatctggaccctcagcgcagcgagtcgttgtggcgtttacacgtcgatgctgctcagacattggtcaatcacttcgccccgaccatggggccaggcgggaggatcgttctgctgggaagccgtacgtcacgaggcgccgctggtcgctcgcagtatgcggccaccaaagccgcgctggtcgctctcgccaggagctgggcggcagagctggcgcctgccggggtgacggtcaacgtcgtggcccccggcgcaaccgatacgccgatgcttcatcagccaggcagagaaagttccccgccgcggcttccgccgcttgggcgactcattactccgcaggaagtggtctctctggtgagctggttgctgagcgagggcgcatcggcgatgaccggacaggagctggtgatgtgtggcggcgcatcgctgggctgatgctatgtcgcacccggggagcggaagtagattaccgctccccggggcgacgcgggggcgatgattaacgcaggtaaaccgttccgcgcatataggtggtggcctggccgctaatcagcacacggtcgccctgccactggcagcgcaggtcgccgccgcgagcggagatctggcgcgccatcatggtggttttccccagcttttcgccccaccaggggatcagcatgctatgggcggagccggtgaccggatcttccggcaccccttctcccgggcagaagaagcggctgacaaagtcatactcttcatccggcgcgctgacgcagatcattttgccaagcgttcgcagccgcgccatatccggtcgcaccgcttcaacctgctggcgatccgccagcaccaccagataatcgcgcccttcccgaacttcaacggcggcctcgagtcccaacccggtcagcagatccgccggcgggttttccaccggggaggtcgaccacgccggaaaatcgagcgtcagccagtcgccattacgggtgacccgcagctcaccaacaaaacgggtgctaaagagaatcgtcgccgaaggatggtcgagatattcgaaaataacgtgcgcagcggcgagggtcgcgtggccgcagagattgatctcagcgagtgtggtaaaccagcgcagctcatagccctcgtcggtacggacaaagaaagccgtttcggattgattatgctgctgggccattttcaggagcacatcgtcggctaaccactcgctgagcgggcagacggccgcggcattgccgccaaagtttttatcgctgaaagcatcgaccagataaaattgaatttcctgcataccctgtccttactttttttactttccttcaacatgacataaaagcgcccccttgacactatccatagcaaaattaatcgcttaaccgcggtcagccccttgcaatgaaatgagacgcagatcacaaaatgattgtcttttcgccaacaatcgttttaagatcagcgtcacatctttccctgaatcaccagtccagagcttatgactacgaatacggtctcacgcaaggtagcgtggctacgtgtcgtgacgttggccatcgccgcgtttatttttaacaccacagagtttgccccggtcggtctgttgtcggatattgccgacagcttcggcatggaaaccgcccaggtgggcatgatgctgaccatctacgcatgggtggtggcgttaatgtcgctgccgtttatgctgctgaccagcaaagtggagcgccggcgcctgcttatcggcctgtttattctgtttatcgccagccacgtcctgtcgttttttgcctggaattttgacgtgctggtgatcagccgcattggtatcgcctttgcgcatgcagtgttctggtcgataacgtcggcactggccatccgcatggccccgccgggcaaacgggcgcaggcgctgagcctgatcgccaccggtaccgcgctggcgatggtgtttggtattccgatcgggcgcattatcggccagtattttggctggcggatgaccttcctggcgatcggcctcggcgcgttagccaccctggcctgcctcgtaaaactgctgccgcccctgccgagcgaacattctggctcgctgaaaagcctgccggtgctgttccgccgcccggcgctggtcagcgtgtacattctgaccgtggtggtggtgaccgctcattataccgcctacagctatatcgagccctttgtccagacggtagcgggcctgagcggcaactttgccaccgtactgctgctgatccttggcggggccggtattatcggcagcattctgttcggtaagctcggtaaccagcacgcgtcggggctgataagcctggcgattgccctgctgctcgcctgcctgctgctgctgctgccggcctcgcataacccgcagcacctgatgctgctcagcatcttctggggggtggcgatcatgattatcggtctcggcatgcaggtgaaagtgctggcctccgctccggatgccaccgacgtcgccatgtctctgttctcgggcatctttaatatcggcataggcgccggggcgctggtcggcagccaggtgagtctgcatctttccatggcctccgtcggctacgtcggcgccattccggcgctggtcgcgctggtctggtcgctgatgatattccgtcgctggccggtatcgctggaagaccatcagccgcaccactcctgattccgtcgcacaaaaaagcccgccggtatcgcgccggcgggctttttttctctgcgcatcgcgggcggtcagggatgccaggtcgaaatgatctccagcacgccgttaataataaactgcacgcccatgcagaccagcagaaagcccatcagtcgcgagatggcctcgatgccgcctttgccaaccagacgcataatcgcgccggaactgcgcagacaagcccacagaatcacccctaacagcaaaaagatgatcggcggcgccgccagcaccacccactccgggaagtccacgccgtgcttaacggtcgaggcggagctaataatcatcgcgatggtgcccggaccggcggtgcttggcatcgccagcggcacaaaggcgatattggcggtcggttcatcctgcagttcttccgatttgatcttcgcttccatcgaatcgtgggctttttgctggggaaacagcatgcggaaaccgataaaggccacaatcaatccgccggcgatacgcagcccaggtattgatatgccgaatgtattcatcaccacctgaccggcataccacgacaccatcaggatggcgaagacatacaccgatgccattaacgcctgtttattacgctcggcgttgttcatatttccggccaggccaaggaacagcgccacggttgtgagtggattcgccagcggtaaaagcaccgccaggccgagccctattgctttaaacaaatcgaacatagttaattaaagtcccgttaatattcattttttaagaatggtttcattccgtgagtatatcggcttcaacaaatttgacgccagcctgctgataaatcacttctgcaaaaaaataacaagcgttagaaaaatcataaagagtgacccacatcgtacttttccattttagcaaatcgtggcatcggccaattcataatgttgacttatgattgcctgggcaatagtatcacttgcaactaattacttgcctgggcaaccattatgaaaagtaccagcgacctgtttaatgaaatgatcccgctgggtcgcttgatccagatggttaaccagaaaaaagatcgcctgctcaatgactacctctcacctatggatattaccgcgacccagtttcgcgtgctctgctccattcgttgcgaagtatgtattacccccgttgagctgaaaaccgtgctttccgtcgatccgggcgcgatgacgcgcatgctcgaccgcctggcgtgcaaaggctggattgaacggttacccaaccccgctgacaagcgcggcgtgctggtgcagttgacgccggacggcgcagccctttgcgagcagtgtcatcaggttgtgggtcagaagttacaccaggagttaacgaaaaatctgtcggcggacgaagtcgccatgcttgagcaactgctcaagaaggtcctgccgtaaaaataagaagaggtaagatgatgtccagacgtaataatgacgccatcactatccatagtattttgtcgtggatcgaggataacctggaatcgcccctgtcgctggaaaaagtgtctgagcgctccggttactctaagtggcacctgcaacgtatgtttaagaaagagaccggccattccctcggccagtacatccgcagccgcaagctgacggagattgcgcagaagctcaagcagagcaatgagccaatcctgtacctggcggaacgctatggtttcgagtcgcagcagaccctgacgcgaacgttcaagaactatttcgatgttccgccccacaagtatcgcataacgaatgtacctggcgaatcccgctatctacatccgctaaataactgatgttaatcgcctgcactataaaagacgtattgaggaaatcatgaaactattcgctgccgcagctatcgtactcttgtcgctggcctccagcctcagctatgcggagcaaaacaccacgccggtgcgtcaaaaccagcgtgatacaatgattatcccttccgaacataatgattcgccgtttgatttcaatcatatggcggctggtaatgataaatctgacgaacttggcgtgccgtactaccagcagcacgacctgtgatgccattacacgcataattgtgtatagccccgtctccggggcttttttttatccgcgcgccatgccaggccgcaccaaacgtaagccaaagatattaatgtagagcccggccataatcagcaccgccccggtgagctgcagtccgctcagcgtctccccgagcagcagcgcagcgctggccattcccaccaccggcaccagcagcgacagcggcgccacccgccaggtttcataccgccccagcagcgatccccagatgccatagccgacgatagtggcgataaacgccagataaagcagcgacagtatcgtcagcagatcgatgtgttgcagactcgccagcatggtctgcggaccatcgatcaacaatgaggccagcataaacggcagcaccgggatcagcgcgctccagaccaccagcgacatgattggcggccggctcgtctgggacatgattttcttgttgaaaatattgccgcaggcccagctgagcgccgccgcgagggtcagcataaagcccaccagcggcacatgttccccgccaaggctgccctccaccagcaccagcacgccaaagatcgccagggcgatccccgccagctgcttgccctgcagacgttcgccaaagacgaaggcgccaaggatgatggtgaagaaggcttgcgcctgcagcacaagggaggccagcccggccggcatacccaggccgatagcgcagaacagaaaggcgaactgaccgaaacttatggtcaggccatagcccagcagcaggcgcagcggaatagctggccgggcgacaaacagcagcgccgggaaggcgaccagcataaagcgcagccccgccagcatcagcggcggcatattgtgcaaccccagcttaatcaccacaaagttaagcccccacaccaccactaccagcagcgccagtagtccatctttcctcgtcatacccctgcctctgtcgttattggaatttttgtgaacaaaatcaaagtagcgaaaaagcggccgccgggatagatcattatttttggcaggcccggaagtgcgcccgtcgaccgcgatgacctgtacaaggcgtaatgaccgtgttatttgtgatcgaagacataaaattataacaacatgacaggcaaggaaatcatgatcaccactctccggcgctccaccatcgcgctgctggcatcgtcgttactgttgactatcggccgcggggccacactgccgtttatgaccatctatctcacccgacgctttcagctggaggtggatgtgattggctatgccctgtcgctggcgctggtggttggggtgttgttcagcatgggttttggcatcctcgctgacaggttcgataaaaagcgctatatggtgtggtcagtgctggtgtttattctcggcttcagcgcaataccgctggtcaataacgcccccctggtggtgatcttctttgcgctgatcaactgcgcctactcggtcttttccaccgtcctgaaagcctggttcgccgaccggctgacggcagagaaaaaagcgcgcatcttctcgctgaactacaccatcctcaacatcggctggaccgttgggccgcccatcggcaccctgctggtaatgcacagtatcaatttgccgttctggctggcggccgcctgcgccgcctttccgctggtgtttattcagctgtttcttcagcgggatggcgccgccgcggcccagccgggcgccgcgccctggtcgccttcggtgttgctgcgcgaccgggcgctgctgtggtttacctgctccgggctgctggcctccttcgtcggcggcgccttcgcctcctgtctctcgcagtatgtgctggtggtcgccagcagcgatttcgccgagaaagtggtggccgtggtgctgccggtcaacgccgcggtagtggttgctctgcagtacgcggttggccggcggctgagcgcgagaaatatccgcccgctaatgaccttcggcaccgtctgctttgtgatcggccttgtgggctttatgttctctggcgccagcctgtgggcgtgggggatctcggcggcgatcttcaccctcggggaagtgatttatgccccgggggagtatatgctgattgaccatattgccccgccggggatgaaggccagctacttctccgcccagtcgctggggtggctgggggcggcattcaacccgatgctgacgggattgatcctcacccatctgccgcactggtcgctttttgtcattcttatcgtggcgattgtcgccgcctggctgatgattttccgcgggatcaatgcccgcccctggcaaccggattctccgctggccaacgcctgacgccagctggcatgcggctgtcaggttgctgtcgggccgttgtcgggtcgctgtcgtggtggctggcggcccggttcaccatactccatcacaggtttacatccgcagaacgttatggagcatacgaatatgaacagcaacaatcaggtcaaacaattacggctgcagcgcgcctggtcccaggagcagctggccgaaatggcgggtctcagcgtccgtacgatccagcgcattgagaatggcgaacgcccggggctggagaccctcagcgccctcgccgcggtctttgaggtgacggtggccgagatcggcggcgaagcccggcgggaagacgcgccgggccaggaagcctcactggatttgcgcatagaggaagccaaagcgcgggtgcatcaggagagccgctttttccgttcgctgtcggtggcgctggtggtttgcgtgctgctggcggtgcttaaccgcttcactaatccacagtactactggtccggctgggtcgccctgatctggggcgccctgctggtggtgagaggattacgcctgttcgtgttcggcgaatggattaaaaactggcgccaggcgcgcctgcagcggctgctgcgcaaataggccgcaaaccggcggcgcgaccgccgccggcatggtcagatggtcaccatcgcgcgcacgccgtcgctctccatatcatcacccttgccttgctggacgatggcgccgcgcgacatcaccaggtagtggtccgccagtccggcggcaaagtcatagaactgctccaccagcaggatcgccatgtctccgcggctcgccagctggcggatcacctcgccaatctctttgatgaccgagggctggatcccctcggtgggttcatcaaggatcagcagctgtgggcggctggccagcgcgcggccgatcgccagctgctgctgctggccgccggataagtcaccgcctcgccgctgcttcatggtcctgagcaccgggaaaagctggtagatctcctccggcacctgctgcgcttcgcgggcgggaaagcgcgacagccccatcagcaggttttcttccaccgtcaggcgcggaaatatctcgcgcccctgggggacgtaggcgaccccggcctgcacccgctggtgcggtttgcgatgggtgatgttctgatcctgccagcgtacctcaccgctgcgcgccgggatcagccccatcaggcatttcagcagtgtggtcttaccgacgccattgcgccccagcaggcaggtgacttcgccctggcgggcggaaaaatccaccccgcgtaaaatatggctgccgccgtagtattgatgtagctgactcacctgtaacattggcgctccttaacgtcccagataaacttcaatgacctgctcattggcctgcacctcccgcagcgatccctccgccagcacctggccctgatgcaggaccgtcacccggtcggcgatggtctcgacaaatcccatgtcgtgctccaccaccatcagggagtgctgtccggccagcgtgcgaaacagctccgccgtatactccgtttccgcatcggtcatgccggccgccggctcatcaagcagcagtagatgcggctcctgcaccagcagcatgccgatctcaagaaactgtttctgaccatgggacagcagaccggcctggcggtagcgctcgccgtcaagacgcagcaggcgcagcacctcattcagccgatcgtcctgttcgctgctcatccgggcgcgcaggctggcccacaccgatttatcccccttcatcgccagggcgagattttccgccaccgtcagcgcttcgaagaccgtcggcttctgaaacttgcgcccgatgccctggcgggcgatggccaccgggtcaagagtggtcagatccaccgactggtcatagagcgctttgccgctttgcggccgggtcttgccggtgatcacgtccatcagggtggtcttgcccgccccgttggggccgatcacgcagcgcagttcgccgacgcctatcgccagcgacagatccgtcagcgcccggaaaccgtcaaagctgacgttgatgttctccagctgcagcaccggatcggtttgttcgcgaaagcgatcgccgggcagctggcgggtaaacagtccttcatccggttgcattagcggtctcctcgacgcagcaggcccatcaccccgcggggtaaaaacagggtcacaatgatgaagatgaggccgagaaacagctgccagtactctggcatcgccacggtgaaaatgcttttcgcaccgttgaccaacccggcgccaagcaccgggccaatcagggtgccgcgcccgccgagcgccacccagatggcggcctcgatggagttggtcggcgacatttcgctggggttgatgatccccacctgcgggacatataacgcccccgccagaccgcagagcaccgccgacagcgtccacaccagcagcttgaagccgcgcgggtcgtacccgcagaacatcagccggttttcggcgtcacgtaccgcggtgaggatccggccaaacttactctgcgccagcgccgagcccagccacagggtcagcaacagcagcaaaaccgtggccataaacaggctggcgcgggtgccggtggcggtgacaggaaagcccagcagcgtggtaaaaccggtgaagccgttattcccgccaaacccggtctcgttgcgaaagaacagcagcataccggcataggtcagggcctgggtcatgatcgagaaatagacccctttgatcttcgagcgaaaggcaaaccagccgaacaccagggccagcagaccgggaaccagcaccaccagcgccatcgcccaggcgaaatgctgcgtgccccaccagaaccagggcagctcgctccaggagagaaaagacataaacgccggcagaccgtcgcccgccgcctggcgcatcaggtacatccccatggcgtacccgccgagggcaaagaagatcccgtgccccagcgacagcatgcccgcatagccccagaccagatccagcgccaccgccacaatggcgtagcagaggattttgccgctcagcgtcagcagccagctcggcaccgccagcggatgggaggccggcagcagcgccaggaatggcatacacagcagccccagcaccagcaggatccccagccagcgcagaggccgcggcgcgcgctgcgccagcgttaaggtgattggttggctcattagtcaataaccctccctttcagcgcgaacagaccctgcgggcgtttctgaataaacagaataatcatcaccaggatcaggattttgcccagcaccgcgcccatttgcggttcgagaattttgttgaaaatgcccagcccaaaggccgccgccacgctgccggccagctggccgacgccgccgagcaccaccaccagaaacgagtcgatgatgtatccctgacctagttcaggcccgacgttgccaagctgcgacagcgccacgccgcccagcccggcaataccggagccgaggccaaaggccagcatatccacccgcccggtaggcacgccgcagcaggcggccatcgcccggttctgcgtcacggcgcggacgttcatccccagacgggtacggttcaggatgagccaggtaaagcacagcaccagcaggacgaacgccagcaccgccagccggttccacggcaggatcaggttcggcaggacctgcacgccgccggagagccaggccgggtttgccacctccacgttctgcgcgccaaacaacatcctcaccagctggataagcatcaggctgatcccccaggtggcgagcagcgtttccagcggccgaccatacagatgacgaataatggtgcgctccagcgccatgccgatcccggcggtcaccagaaacgccaccggcagcgcgatcagcggataaaaggccagccattgcggcgcgagctgcgccagcgcctgctgtaccagccagcagctgtaggcgccgatcattaacatctcgccgtgggccatgttaatcacccccagcaggccgtaggtgatcgccagccccagcgcggccagcaacagcaccgatcccagcgacagccccataaaggcctggcccagcagatcgccgagcagcagacgatgtttgatcttttgcaggctatcgctggccgcctcgcgcaccgccgcatccggctcatgctgggcatcggtaaaggggatcagcagcgcctgggtttccgggtccgcggaatggccgagcagcgtcacggcggccagccgcgcgctggcctcaggctgagcgagctgcaggcgcgccagcgccacctccagcagaccccgcacattttcatcggtttccgcctgcagccgctgttgcagcagcgcggccatggccggggtcgcttcccgctgtagcgttcgtgcggcggaagctcgctctgtgacgttgtcacttaaaataaagtggctggccagcgcgccggcagccagattgcgcagccggttggtcagacggaccggtcgggtttcgccctgcggcgcggcgacagcgcccaatggctgtaatccgccctgtcgggtgcggaaagcatgttttccgtcgtccatcaccaggctctcggtggtcaacgcccgcagcagcggcagacgatctgcctgcggcgctgccgcccactgggtcaacagctgcgcctgctggctgcgactggcggcaacgaagtcgtccgcctccgcggcctgcgcccgccatggcagcaggatcagcagtagcgccaacacattcatgagacgcaatgcgttcatgtcgttctcctctggtcagcggccgacgggcgctatgctccagccccgccggccgtggcgcttactggctgacggttttcaccggatggtcaggtttcttatcattaccggggatccacggactccacggctgcgcgcgaacgggtttatcggtctgccagaccacgttgaactggccgttgccttcaatttcaccgatcatcaccggcttatgcagatgatggttagtggcatccatggtcagggtaaatccggacggcgcgttgaaggtctgcccggccatcgcctcgcgtactttgtcaacatcggtggtgcccgctttggtcaccgcctgcgcccacatatgcaggcccacccaggtcgcttccatcggatcgttggtcaccaccgtatcggcattcggcagcttgtgcgctttggcatacgcgcgataatcggcgacgaaggctttgttggtcggattatcgacggactcaaagtagttccatgccgcgaggttgccgaccagcggtttggtatcgatgccgcgcagctcctcttcccccaccgagaaggccaccaccggcacatcggtcgctttcagaccctggttagccagctctttgtagaacggtacgttggaatcgccattgatggtggagaccactgccgttttgccaccggcggcgaattttttgatattggcgacgatggtctggtaatcgctgtagccgaacggggtgtagacctcctcgatatctttgtcctggatccctttggcatgcagaaaggcgcggaggatcttgttggtggtgcgcggatagacgtagtccgtccccagcagaaagaaacgtttagcgccgccgccgtcctcgctcagcaggtattccaccgccgggatagcctgctggttaggcgccgcgccggtatagaagacgttgggggacatctcttccccttcgtactgcaccgggtagaacagcaggccgttcagctcctcaaacaccggcaggaccgatttacgcgagaccgacgtccagcagccaaacaccaccgccactttatcctgggccagcagctggcgcgccttctcggcaaacagcggccagttggaggccgggtcgaccaccaccggctccagtttcttgcccagcaccccgcctttggcgttgatgtcgtcgatggccatcagcgcgacgtctttcagcggcgtttcggaaatcgccatcgtcccggagagcgaatgcatgatcccgactttgatggtgtcggcggcataggcctggaaggagagacccatagccataacagaggcggagagtgcaaaagcttttaataacgttctacgttgcatgattcactcctgagtagcgcaaaaaataaagaattaacagctaaccagaggtgataaggcaaaaaaggtgccaggttgtgaaaacagcaggatgcggcgcaggtgggcgatagtggcaaagaggatggcagcgttgcctcatcacggtgcaacgctgcgctaagaaagcaattaccagacgtcggcggcgatggaggtcaccagacggaccttttgccattgctggtcttcgctgagggcattcccctcttcagtggaggcgaaaccgcactgcgggctgaggcagatctgctcgagcggcacgtactgcgcggcctcggcgagacgcgcttttaccccctgcggattctccagctcaccgtttttggtggtgatcagcccgaggaccacctgctgatggccgggacgaataaagcgcagcggcgcgaaatccccggagcggtcgttgtcgtactccaggaagaaggcatcgacattaacgctgccaaacagcacctcggcaaccggctcgtaaccgccttccgagatccaggttgaacggaagttaccccggcagacgtgcaagcccaccgtcagatcggccggcttaccctccagcgcctggttcagcacccgggcataaatacgcgccagcgcatccggatcctcgccgcgctcacgtacctgctggcgctgggcatcggagcacagataggcccacacggtatcgtccagctgcagatagcggcagccggcgtcataaaacgcgcggatggcgtcgcgccaggtggtggccagatcgtcgaagtagtcgctaagatccgggtagaccgtggcatcgatatctttccgcccgccgcggaagtgcagcacgctcgggctgggaatggtcatcttcggctgcgcgtcgccgctgatgcttttcagatagcggaaatcctccagcatcgggtggtcgccaaacgccagcttgccggtgacgcgaacgccgtgcgctttggtctgcacgccgttgaactggatcccctgctcggcatcgtaacgttcaacgccctgcaggccatcgaagaaatcgaaatgccaccatgcgcgacgaaactcgccgtcggtgaccacatgcaggccgcagtcgcattgctgctgaactagatgacggatcgcgttattctcaatctcgcgtagctgagcggcgtcgataatcccctcagccagctgctgacgcgcctgtttaatgctgtccgggcgcaaaaaactgccgacgatgtctgcgcggaacggggcctgttgacgttgcatgctgtctccttagcggtgggcgcgttagttgcccaccgtgatagttcattatttgaatttttagacttctggatggctatatgtccagatactggcatgcagagtggtgggtcgcaaacgagaatatttcatggtacatgaaatattttcatttaccggaaacaaacgcatagccctcatcttcccagccggtgagtccgccgagcatcattttcaccggccgccccagctcggccagcttcagcgcggcaacgtcagcgccgttgcagtgcggcccggcgcagtagaccacaaagagggtctccgccggccaggccgccattcgctcggcggtgatctggctgtgcgggagatgctgcgcgcctggcaggtgacgtctggcgaaggcttcctcactgccgaccacgtgcagcaggacaaagtcgacctcgccggcacgctgggcgctgtgcacatcggcgcagtcggtctcaagatgcagcttatggctgaaccagcggatagcctcagcggaggtggcggggggaaattgggttactacactcatggcgtcttctccttgtctgtgataacactactttactgacgcccatcaccctgatctgccgacaaccatgacagaaaacgctaacatcctgacaaccccttctgtgacaccgtcacgtcatcaggtggtcgccctcgcctacgatggcctgtgcacctttgagtttggcgtagccgtggagatcttcggcctgccgcgcccggaaatgggcgacaactggtaccagttcgccgtcgccgccgtcgatgaagggccgctgtgcgctaccggcggcatccgcctgatgaccgacggcggtcctgaacttctcgcccaggcggatacgatcgtggtccccggctggcgcggcgtcgacgccccggtccccgaggcgctgtgcgccgcgctggcttccgcccacgcccgcggatgtcggattatttctatctgttccggggtgttcgttctcgccgccgccgggctgctcaatggccgccaggcgacaacccactggcgctacaccgcggcgctgcagtcccgttttccgcagatccaggtggtggaggacgtcctttacgtgggcgatgctttgctgatgacttccgccggcagcgcggcggggatcgacctttgtttgcatctggtgcgtgaagatttcggcagcgaagccgccaacgtcgtcgcccgccgcctggtcgtctctccccatcgcgacggcggccaggcgcagcaggtcctgcgcccggtagcccgcagccgggagagcctgcgcctcggtcagctgtttgactatctgcaccagcatcttgccgccagccataccgtcgcttccctcgcccagcgcgccggcatggggacgcgcacctttttgcgccgctttgaggaggccaccggtaaaacgcccgcccgctggctgctggaggaacgactgctgcgcgcccgccagcacctgacggagagcacgatgggcatcgatcagatcgctgagcgctgcgggtttgccagcgccggcaccctgcgccaccattttcgccagcacttcgcgctcagcccgctgcagtaccgtaaacagtttacgccttctccgattgcaaaatcgtcgcagccacggacaatagacggccacagtaaaccggtcgccaggagggtcgatgatgaagaaagagtgtcgggtagtgatctataaagaggggctgctgggcagtctgttttttggcgaagccaaggccgaccctgacaaaatgagccagtttctcagcagctatacccgtgagggatgggaagtgaaaaccatgtcggtggagcgccgccgtaccgccctgttctggtcgcgggaagcgtatcttttcgtgctcgaacgccccctctgatagcctgcgcctggtttacacgtttaagccaggcgtttctaagcgtcagctttcagggctgacggatatagccctgctcctgcattttctgcatgccttcctcgctggcgcagaccatgccggtagtcaacatggcaaagccaaagcgctgataaaacgtaattttatcggccaccgcatagataaatattttgccaaagggcaggagttgctcccggatggccagcatcagctgttgcccgtagccctgtccctgacgagcggggacgatcgccacatccgccagatagctgctccaggtgcagtcgctgatggctcgcgccacggcaatcagctgaccgttctcatagccaaaccagcagaaggtgctctggcggaacgcctgctccagttgctgaacatcacgctcattcagcccggcctcggcgatgatcgttcgcactcgctgccagtccacccgcacgatcgcctctttaccctcaatcaccatcatgaccttgtctcccgtcgtctcccggaagcaagatctagcatgccgcggcaggatatgccagatggaaagccggactgaagcagtcggtacagggtggaaggggcaaaaaaaaaccgccatatgtctggcggtaaatcaatgcttgcatggatagattgtgttttgcatttttcgcagacagataagctttacctctctacgtttgctgccgaagttagcatgctcaacttcaataaagcctcaacgaccagcagctaaagcttctccaccagcgctttcagctgcgccagggtctgctgccggtcctccgcggcggcgacaggccaggccgactggcgcacgatgagccgggtcggcagcagctcgcggatccgcagctgcggggccgccatcagggcaatcagccgctccaccgcccttttgcccaacagatcgaagtcctgcgccaccgtggtgagcggcggctggaagtaaaggctgtcggcggtgtcatcgtagccggtcaccgataccgcctggctgccgctgcgattgagctgggccagcgcgctgagcacgccgagcgccatctgatcgtttgccaccactatggcgctgatccgcggctgcagatggaggagctcgaaagttttctgccaaccgctggcggcgctccagtcgccaaacaccgtagtagagcgggcaatattcagactgtgcaacgcctcgcgccagctggcgagacgcagacgggcggaaaccgaactttccggtcccgccagcagaccaaattcgcgatgccccagctcccacaggtggcgcacgcaggccccgcagccgtcgcggtggtcgaagcgcacgcagcagacatcggcctccggggagacatcgagaaacaggcaggccatatccggattgtcttgcaccagccgctcggcagtggcgctctccagcggcagactgacgatcaccccgcgaatatgctgggcgcgcagctcgtccagccgggcctgcagcgcgacaaaatcagcctgcgccggcatcgctatcgccacttccagctgatgcaggctggcatggctctttatcgcggcggcgatctgcgagggggcgtgcagcgtcagcgaggcggtaatcagcccgatggagggcgccgctttgccggcaagcagctgcgccgagcggttaggcacatagtgcagcgcctgcatcgcgcggatcacctgctcgcgggtgcgggctgacaccacctcaggacggttcagcacccgggagaccgtctgctgggacacgcccgcggcgcgggcgacatcctccagggttgcggtacgacgcggcatcttttctcctcagcaataacaatgtcgtgcgctaacattttatgtttaacgcgcgacaaaaaacagcgcttctcccccgctttcgtgatcgtctgttaatttcgattcccccgagattgctggacaaaacaaattacccgataacgttaaccatcctgtttagcgaacgacaatttctgacttaccggggtttaatatgcaaattagcgataccggccgcagccacactcctgactttcacgccgtcctcgcccgtgaagactggcagaaccagaccattacccaccttaaccgcctgccagcgcatcccgttttcgccagctggcgcgatgagcttgccgcccgcgataacctaccttcatcccgccgccgtcaactggacggcgagtggcagttctcttacgcccgcagcccgtttgccgtcgatgcgcagtggttgacgcaggatctaccggactgccgcggcacgcctgtgccttccaactggcagatggagggctatgacgcgccgatctacaccaacgtccgctatcccatcgacaccaccccaccgcgggtgccggaggataacccgaccggctgctactccctgcactttacggttgaggacacatggcgcgagaacgggcaaacgcagattattttcgatggcgtcaactcggcgtttcatctgtggtgcaatggcgtgtgggtcggctattcgcaggacagtcgcctgccggcggcgttcgatctcagccccttcctgcgtccgggcgacaaccgcctgtgcgtgatggtcatgcgctggagcgccggcagctggctggaagaccaggatatgtggcggatgagcggcattttccgctcggtatggctgctgaataagccgcagcaacggctatgcgacgtgcagttgacgccagcccttgacgccctctatcgcgacggcactctgcaggtccaggcgaccatcgaagcgactgaggcggcgcttgccgggctcagcgtcggggttagcctgtggcgcggcgaggagcagatcgccgccgggcggcagccgttaggtaccccgacggtggatgagcgcggccactacgcggaacgggtcgatttctccctggcggtggcgacgccggcgcactggagcgcggaaaccccgaactgttatcgcgccgtggtcaccctgtggcgcggcgacgaactgctggaggccgaagcgtgggacatcggttttcgccgcatcgagattgccgatggcctgctgcgtctcaacggtaaaccgctgctgatccgcggcgttaaccgccatgagcatcatcatttgcgcgggcaggtggtcaccgaggcggatatggtgcaggacattctgttgatgaagcagaacaactttaacgccgtgcgctgctcgcactatcccaacgcgccgcgctggtatgaactctgcaaccgctacggtctgtacgtggtcgatgaagccaatattgaaacccacgggatggtgccgatgaatcggctgtccgacgatccggcgtggctgccagccttcagcgcccgcgtcacccggatggtacagagcaaccgcaaccatccgtgcattatcatctggtcgctgggcaacgagtccggcggcggcggcaaccacgaagcgctgtaccactggctgaaacgcaacgatccgagccgtccggtgcagtacgagggcggcggcgcggataccaccgccaccgatattatctgtccgatgtacgcccgcgtcgaacgcgaccagccgatcccggcggtccccaaatgggggatcaaaaaatggatcagcctgcccggtgagcagaggccgctgatcctttgcgagtacgcccacgcgatgggcaacagcctcggcaacttcgccgattactggcaggcctttcgcgagtacccgcggctgcagggcgggtttatctgggactgggccgaccaggcgatccgcaaaacctttgccgacggcagcgtcggctgggcctatggcggcgactttggtgataagcctaacgatcgccagttctgtatgaacggtctggtgtttcccgatcgtacgccgcatccgtcgctggtggaggcgaagcacgcccagcagtattttcagttcacgctactgtcgacctcgccgctgcgggtgcgcatcatcagcgaatacctgttccgcccaaccgataacgaagtgctgcgctggcaggtgcaggcggccggtgaacccctgtatcacggcgacctgaccctggcgctgccccctgagggcagcgacgagataacgctgctcgatagcctgatcctgcctgaaggcgcccgcgcggtgtggctgacgctggaggtgacccagccccaggcgaccgcctggtcagaagcggagcaccgcgtcgcctggcaacagtttcccctgcccgccccgctggcgctgccggcgcccaccgtgtctgccggcgctccggatcttatcgtcagcgatgaggtctggcagatccgcgccggttcgcaatgctggaccatcgatcgccggacgggtctgctgagccgctggtcggttggcggtcaggagcagctgttgactcccctgcgtgaccagtttattcgcgcgccgctcgacaacgacatcggggtcagcgaagtagagcgtatcgaccccaacgcctgggtggagcgctggagaagcgccggcctgtacgatcttgaggcgcactgcgtccagtgcgatgcgcagcgcctggcaaatgaaaccctcgtcgactgccgctggcactacctgcgcggcgaagaggtagtgattgtcagccactggcgcatgcacttcactgctgacggaaccctgcggttggcagtggacggcgaacgggcggaaaccctgccgccgctgccgcgggtcgggctgcacttccaggtggcggatcagcaggcgccggtgagctggctgggtctggggccgcatgagaactaccccgaccggcggagcagcgcctgcttcgcccgctgggagcagccgctggcggcgatgaccaccccctacatcttcccgacggaaaacggcctgcgctgtgatacccaggcgctggactgggggcgctggcacatcagcggtcatttccacttctccgttcagccatggagcacccgtcagctgatggagaccgaccactggcacaagatgcaggccgaagacggcgtgtggatcaccctcgacggcctgcatatgggggtgggaggcgatgactcctggacccccagcgtgctgccgcagtggctcctgagccaaacgcgctggcagtacgaggtctcattgcgttgcttttaatccgtgggggcgacagcccccaccccacaaacagaataacaagggatcatggtgatgaaattctcagaactggcgccacgagaacggcataatttcgtctatttcctgctgttctttttcttttactatttcattatgtcggcctacttcccgttttttccggtgtggctggcggacgttaaccatttaactaaaacggaaaccgggatcgttttctcgtctatctcgttattcgccattatttttcagccggtgttcggcctgatgtcggataagctcggcctgcgcaaacatctgctgtggaccattacggtactgttaattctgttcgcgccattctttattttcgttttctctccgctgctgcagatgaatattatcgctggttcgctggtaggcgggatctacctggggattgttttctccagcggctccggggcggtggaagcttatatcgaacgcgtcagccgggccaaccgctttgaatatggcaaagtgcgggtcgcaggctgcgtcggctgggcgctatgcgcctcgataaccggcgtgctgttcggcatcgatcccaatatcaccttctggatcgcctccggctttgcgctggtgctcggtctgctgctctggctgtcgcggccggaaagcagcaacagcgcccaggttatcgaggcgctgggcgccaatcgccaggccttttcgctgcgtacggcggcagagctgctgcgtatgccgcgcttctggggctttatcgtctatgtggtgggtgtcgccagcgtctacgacgtgtttgaccagcagttcgccaactttttcaaaagctttttcgccagtccgcagcgcggtaccgaagtgtttggcttcgtcaccaccggcggcgagttgctcaacgcgctgatcatgttctgcgcgccggccatcgttaaccgcatcggcgccaaaaacgccctgctgaccgcggggatgatcatgtcggtgcgtattctcgggtcgtccttcgcctcatcggcagtcgaggtggtgatcctcaagatgctgcatatgtttgagatccccttcctgctggtgggaacttttaaatatatctcttccgcctttaacccgcgcctctcggccaccctgttcctgatcggttttaatctgtcaaaacagttgtccggggtggtgctttccgcctgggtgggccggatgtacgacaccgtcggcttccatcaggcctatctgatcctcggctgcataaccctgagcttcaccctgctctcgttcgtcaccctacgcggcggcaaccgtctgctgccgaccgcagagacgcagagccccgcctgactccagcgcccccgtcagggatgacgggcttcactcgacaatccgcgtctcaccgccgcgattctccagcgcatagcgctgacaaggcgccccggcggcgataagctccgccagctccgccgagtggctggtcagccagatctggctgtagcgcgaggcctcgataatcagccgggccagcgcgggcaacatgtcgcgatgcaggctgttctccggttcattgatcgccagaaacgccggcgggcgtggactgagcagcgcgacggcgaggcacaaaaagcgcagcgtaccgtcggacatctccgccgccagcagcgggcggcggatcccttcgcgacgcattttcagagcgaaacgcgagtgctcgttttcacaataaaactggcagccgggaaaggcgtcggcaaggatttcatgcaaaatctcctccgcgccgatctcgacaatggtctgaaaggcggcggcgagattctggccatcgctgtcgaggactggcgaacggtaacccacggccggctgacgcagcggcgaatgacggccaatcgcgaattcatgataaaaccgccaacggcgcaaggtctcccgcactcgcgatacttcggggaaacggtgcggctcaccaagctgaccgaacaccgactcattttcataaatactctcggtgaaagtacttttctccccggtgacatcgacgagaaacgccgcctgattcttgcgctgcagtacgcgggaggaaggccggcgggagtagccggccagccagatattctcttctttaacgataggatcgagcatgaattgcgtcggatagggcaatttttcagggaagcctatctgcagctcataatcgaagctgtcggtccggcaggcgatttgcagccggcgggggtgacgatcgaggggcgaacgctccccggaccacatcatattctccagaccgccctcttcgctgataaaccccgaaagcctgccctcagcggcagcggtcagcaggtggatggcgttataaatattggatttaccgcagccgttagggccgaagacaatgttcagcggcccgagctccagcgcgatatccttcactgagcgaaaattttgaatacgaatgtactgaatcattatgcgtccggccctggaaatagaaggctgccacagtagcacagcggcgcccggcataccctcttacgccccctttcgggcagggtttaacagaacatttttttcattccacgggtcagggcgacccgcgtcagcttatcgctatcctgatgggcgtcgctgaaaacgccaaaaaaatagcgttcatcgtcaatggtttggctaacaattcggtagctcaacggttgcccggatagcgcaccgtactgcgcaggcgtcaccgagacctcggtcgcgtcatcggcgacgctgaccaacagcccgtccgccttaccgcccaccagcatgaccttaattatcgggtgcaccagttcctcccgggatggcatatagcgttggcgaaccgcagggaccggcgggcgtggtgatcggcaaacagcgacgcccgacagagtgcggtacttagtactttcttatagttcatcacggccttgagtcaaaaaatagcgtgcttaggcagggctagatattgattattcgaaataaaagatgacaaatgatgaaggaaaaaagaggaattgtgaatcagcaaaacgccgggttattcttatttgtcgcttctttactcgcctttatcggccctcactcaaggatgtattgtggttatgcgttatattcgcctgtgtattatctccctgttagccaccctgccgctggcggtacacgccagcccgcagccgcttgagcaaattaaacaaagcgaaagccagctgtcgggccgcgtaggcatgatagaaatggatctggccagcggccgcacgctgaccgcctggcgcgccgatgaacgctttcccatgatgagcacctttaaagtagtgctctgcggcgcagtgctggcgcgggtggatgccggtgacgaacagctggagcgaaagatccactatcgccagcaggatctggtggactactcgccggtcagcgaaaaacatcttgccgacggcatgacggtcggcgaactctgtgccgccgccattaccatgagcgataacagcgccgccaatctgctgctggccaccgtcggcggccccgcaggattgactgcctttttgcgccagatcggcgacaacgtcacccgccttgaccgctgggaaacggaactgaatgaggcgcttcccggcgacgcccgcgacaccactaccccggccagcatggccgcgaccctgcgcaagctgctgaccagccagcgtctgagcgcccgttcgcaacggcagctgctgcagtggatggtggacgatcgggtcgccggaccgttgatccgctccgtgctgccggcgggctggtttatcgccgataagaccggagctggcgagcggggtgcgcgcgggattgtcgccctgcttggcccgaataacaaagcagagcgcattgtggtgatttatctgcgggataccccggcgagcatggccgagcgaaatcagcaaatcgccgggatcggcgcggcgctgatcgaacactggcaacgctaacccggcggtggccgcgcgcgttatccggcccgcagcacctcgcaggcgtgccgggcgatatgactggcggcggcatcggaaagatgccggtcggtaatgatggtggtgaaccgggtcaaaggtaacgccataaacgtggccacctgattgtatttcgaactgtcgcacagcaggatgcttctcgcgctgacctggctgacggtctccttgacggtaaccttgttctcatcaggggtgaatatcccgcgactgtcccagccgctggcggagataaaggccgtatcgatagccaggtggcgtaacgtacgcgccgccgattcgcccacgcaggagcggttctcccggcacagagtgccgccggtgtggatcacgccgcactggctggcatcgatcagcagctgggttatctcaaaatcattggtgaccacctggagatcgttccggtcgaggatcgcccgcgccagcgccagggtggtagtcccggcatccagatagatgcaactgtttttagcgatatgactcgccgccagcgcgccgatcgcctgtttctcctcactctgcagcgtgcttttcaccagatgactgggttccgcagccagccggctgacggcgcgcacgccgcccgagacgctgaccagcagcccctgctcctccagtttactgacgtcccgacggatggtcatatgggacacgccgaggatctccgtcagctcgttaatgcttaccgccccacgctgctccaccagggctaaaatacgctgatgtcgttctattggaatcaccgctctccccttaccattttttcacaccaggcgtcaccacccaggctacggccctggcgacacccggtgttgttatcgcgctttgccgctgtttttacgctattttagggcaagaatcgccgttgtgcagcctctttccacctgtgaattttttatattcatgtgggttattcgtgataactctcacatattttcacatgataacgctttattctatcattaaatcacattaattaactaatattcacaaggagaccagcatggctgcacacactaatgtctgcgtgattggactgggttcaatgggcatgggcgccgcccgcgcctgcctgcaggcgggcctgaacacctggggcgttgacatcaatcccgacaactgtcgcgcactgctggcggcgggcgccaaaggcgcgggccccagcgcggtgccgttcgccgcggaactggatgcagttgtgctgctggtggtcaatgccgcccaggtgcgggggatcctgttcggcgagagcggcctcgccgcccatctgaagccgggcaccgtcgtgatggtgtcgtccaccatcgcctccgccgatgctcaggccattgccgaggcgctggcggagtaccagctattgatgctcgacgcgccggtatcgggcggcgccgtgaaagcggccgccggcgacatgacggtgatggcctccgggagcgatgccgcctttgcccgcctcgcgccggtgctggacgccgtggccggcaaagtctaccgcatcgggagcgacattggtcttggctcgacggtaaaaattatccatcagctgctggccggggtgcacatcgccgttgccgccgaagcgatggcgcttgccgcccgcgccgggatcccactggagacgatgtatgacgtggtcacccacgcggcgggtaattcctggatgtttgagaatcgcatgcagcacgtcctggatggcgattactcgccaaaatccgctgtcgatatttttgtcaaagatctcgggctggtgaatgacactgcccgggcgctgaccttcccgctgccgctcgccactaccgcgctgaatatgttcacctccgccagtaatgccggattcggtcgggaagatgacagcgcggtgatcaagattttcaacggcatcaccctgccgggccataaacagtgaggagagacaacatgcagcttggtgtcattgccgatgacttcaccggcgccacggatattgccagcttcctcgtgcgcaacggcatgccgacggtgcaactgaatggcgtgccgacccgcgatcttccgctgaccagcgaggcggtggtcatcagcctgaaaactcgctcctgcccggcggaaatggccgtcagccagtcgctggcggccctgcgctggctgcaggcccagggctgtcagcagttttatttcaagtactgttccactttcgacagcaccgcgcagggcaacattggcccggtgctggatgccctgctggccgagctgggtgagacgcggacggtgatttccccggcgctgccggttaacggccgcacggtctatcagggatatctgttcgtcggtgagcaactgctgaatgagtccgggatgcgccaccatccggtgacgccgatggaggatgcgcacctgggccgcttaattgagcgccaggggcgcggaaaagctgcgctgattgcctggccgattgtcgcccgggggccggaggcggtcgccgccgcgctgtcggcagtcaacgatccggcggtgcgctatgtggtgctagacgccctcagtgaacaggatctgctcacccagggcgtggcgctgcgggagatgaagctggtctccggcggttccggcctcgccatcggcctcgcccgcgactgggcgcagcgccatggcgcccggggtgaaagcgctcaggccggcatgccgctggccggcccggcggtggtgctctcgggctcctgctcggtgatgaccaacagccaggtggcggcctatcgtcaacaggcccccgcccgcgccgtcgacttaagcgcctgctttaccgatctggagagctacgtcaggacgctgactgactgggtggacgcgcagcgcgatgcgccgctggcgccgatgatctatgccaccaccgagccgcaaacgctgcagcggatccaggcgcagtatggcgacaaggccagcagcgaacgggtggaacagctgtttgccgctcttgccgccgccctgaaggcgaaaggatttacccgctttattgtggccggaggggaaacgtcgagcattgtggcgcagaccctgggggttgaggcgttccatattgggccgaccatctcccctggcgtgccctgggtgcgtgacacccgccagccgctctccctggcgctgaagtcaggtaacttcggcgatatccagttctttgcccgtgcccagcaggagtttcgtcatgactgagcaacaactgcgagaggaaatggtgcagattggcgcctcgttatttagccgcggctatgccaccggctccgctggcaatctgtcgctgctgctgccggacggcaacctgctggcgacgccgaccggcgcctgcctcggcgaactgcaggctcagcggttgtcggtggtgacgctgcaaggagaatggatctccggcgacaaaccgtcgaaagaggtcacttttcaccgggcagtctatttgcacaacccggcctgcaaggcgatcgtccacttgcacagccactatctgaccgcgctctcctgcctgcaggggctcgatccgcacaactgtatccgcccctttaccccctatgtggtgatgcgcgtcggcgacgtcccggtggttccctactaccggccgggcgatgaccgtattgcccaggcgctggccgggctggcgccccgctataacgcctttttactggccaaccacggaccggtggttactggctcatcgctgcgcgaagccaccaacaataccgaggaactggaagagaccgcacggctgatatttaccctcggcaaccgcgagatccgctacctgaccgctgacgaagtgaaagaactgagataaaaccatgccaaaattcgctgcaaatttatccatgctgtttaccgaactgccgttcctggaacgctttgccgccgctgcccgggcgggatttgaagccgttgagtttctgtttccctatgagtatgccgccggggaaatcagacagcgcctgcaggagaaccagctgcagctggtgctgttcaataccccacccggcgacgtcaacgccggagaatgggggctcgccgccattcccgggagaagcgcggaggcccgacgcgatattgagctggcgctggagtatgcctgccagctcagttgcccgcaggtgcatatcatggccggcgtggtgccgccgggagcggatcgcgcagcccgcgaggccgtgcttatcgataatctgcgctacgccgcggagtgctttgcccgccacgacaagcggatactcatcgaagcactgaatccgcagaccaaaccgggctatctctaccacagtcaatatcagacgctggcgatggtgaaacgggtcgacaggccgaacctggcggtgcagttagatctgtttcacgcgcagaaggtggacggcaatttaagccatcttattaccgaatatgccggccagtatcgccatattcagattgcctccctgcccgaccgtcatgaaccggatgagggcgaaataaactatccgtggctctatgcgctactggataaaaccggttatgacggctggatcggctgcgaatatatcccccggacagacacgctttccgggctggggtggttctcgccctaccggaaaaaataaacgccgttttctaaaaaaataactctctgtacacctgttaatacccgaggcaaacctatgtcgacatcggcgctgttacttattgcgttagccagcgtagtgctgttgctcctgttagtgatcaaagcgaaagcacatccttttgtggcgctcctgatcgtcagtctgctggtggcattcgccaccggcattccggcagataaaattataaccaccattgaaaaaggcatgggcggcctgcttggccacatcgccagcattattattctgggctcaatgctgggggtactgattgaaatgtccggcggcgccgaatcgctggcgaaaacgttgaccggcgtactgggtgcaaaacgaaccattgccgccttaaccatcgtggcttttattctcggcaccccggtcttttttgaagtcggctttatcatcatcattccgttaatctacggcttcagcaaagtcgcccacgtatcgccgctgaagtttggcctgccgatggccggcgtgatgttaaccgtccacgtggcgctgcccacccatcctggcgcagcggctgcggcaggcattctgcatagcgatgtcggttggctgatgctggcggggattggggtgtcggtggtcgtcggtatcgtgggctattttgtcgcccggtttatcaatcggcgccattatcatctgtcgattaacgtgctggagcagcaacaaacggcggaagtaccggatctctcggttaacgcgcagcagacccgtctgccgccgccgaatgcgctggttatcggtgggctgatcgtggtgcccatcatgctgattgtttccgggacgctgtgtcaggcgcttctgctgccggaaaacgcggttcgccagctgatgaccgtcattggtaccccgccggtcgccctgctgatctccctgggcctggccagctggacgctgggcatccgtcggcggatgagcctgaaaaagctgggcgaagtcaccggcagcgcgatcccctcgtcggcggacgtgatcctcgtcgccggcgccggcggcgcctttggcggcgtactggtcgcttccggcatcggtaatgccttagccgaggcgctggagacaatacatctgccgctgatgcccgccgcttttctgctatcgctggtgctcagagcctcgcagggttcggccaccgtggcgatcctcaccacctccggtctgctgtcgcaggcggttgtcggtctggagccgctgcaactggtgctggtgacgctggcgacctgcttcggctcgctcgggctgtcgcacgtcaacgacgccggattctgggtcgtcacgcgctatctcggactctcggtgccggatggactcaaaacctggaccgtcttgacaaccatcatgggggtgacgggctttctcatcacctggctgctgtggtttgcgctttgatgttaacctgggtggctccggccaccttaacttcgccccggcgcaggccctgacccactaccgctgtcagaccgcagacccgctgccgacagcgtcaccgggataaaatagcgtacgcgatagcgcctgtcccctgcctcttcgccttccgcatggcgggttataaaacattcaatgtcatagccgtcccgacgacttacccccagggatggcagcagctccatatacagatcgctggataaacgagcataacgtgaccagctgccgtagaattcaaccccgacataaagccctgaccgggtggtcagcgagcttttcatggccagcgcggggggcagctttcccgcctcatgacagccgacaaaagcgttaacctcgacgttaagctcatttttactcgccgcggcgtagtcggaaagtacggaaagcgagcctccgccagcggtgaaaaaacggtcaaccttttgtctgatgctcgtcttagcggtgctttgcaacaccaaatccgacaggcgcagttcatacttcatcggatagccgtaatagacctgttccggaagagaaaaaaaacgagccagaggtaggctctctccgtccgggtgaaactttttcaacagctttgccgtgtcccagtgcgccgcgcaacggtattcacgtggcgagagcgaaaagcgcttcttaaactcccgggaaaaggtctgcggcgagtcatagcttaactgccaggcaatagcggcgatcggttgccgtgttaagcgcagactgaccgctgcgatggtcaaccgccgcagacgaatatactgcccgatgggtaactggccatactggtaaaacacgtcgtacacaaaccgacgtgaatagcccatatacagcgccaggtcatcgatcgccgggttacaatagatattatcctccagccacgccagcattttcaaatagggcatctgcttcataagtacggcatacatcctgtattcttgtcctccgctaattttaacaacagagcgcggctatcactaagctttttatgcatcgcaaaaataaaaaaacagcaaacggctttaaatagttacaaatatatgcttaaggttttgtttattaggaactttcgcatatcaatataccgttatctcactttccccaccagatattgcattaatggaaaacatcccttagattaccacggctaaaaatagtacctgcatcatcattatattctttaatttatccagatatgttttttaatgcccacagggaagttatatgactaattttttgttcaatataaaaaatcactatttgcgagtcgctattgctgaactggttgatgaagcgatgaaggccgccgggcggccacactatcagttttctcaacaatgggatgcaggatcgatggcgcaagctgatgtgatattcacggaaatggtcgcaggggagtggtacttgtgccaggatctttttcagcatgccccggaacaatatacgctttttattttcccggacaatgaacacgctaccgtagatgagggtttaccgaattgtctgcagcatgcggtatttatgccgcctcacgctcgcgttcagcggctgaaagatgagatagctaacgccattgaacgtccgctgctaccgcggcaagacccgccgttcaatcgtctgcggcgttgcattaattgcgcctgcaggtcggtcagcgacgcgcaaaccaaagtcatttacgcgttcagtattggcctgagcccgcatgaagtcgccgctgcgctaaatattagtcccaaaacgattcattcacataaaaagaatattatgagtaaatttaatttgaatagccgtcagcagtttaacaaccttgtgcaactgctcgccaaacgctgatacaactcgtcattttattctgtcaaacaatcatcttctggaacggaaaacataccgtctcttgcgcctttcctgaatataggaaaagccactccataaagaaatgatgggacataaagtcagacacaaaataataaagaagtcgctcatatcaaacctgacaaaagaatttaatttagagtgataatattcactcgattatattcaggcaagaccagcgcctcatttttgagagtgggaaatagaatggtaggataattcctggtagcgaatattaacaggtaaaataagacgcagcgccagtgtctgaggagggaatgagaggcctgttagcgtctttttgcattgaggatgagaaaaagatagccaaatgtgtaattccctgtacagtggagggaatcacaaagtgaagctcgcgttccgcgtagcggacatcacggttggttgaatgtttgtacatatcagcctcgccctcctttagggtcaggccatactcatcttgcatgctgagcgcggatgttcttacgccgcgggagcgatcgtaacaactatgctaaccaccctgatttaccgcagccaggttcatcctgaccgcccgcccgtcgatctcgacgctttagtccatcgcgccagcagtaaaaatttgccccttggcatcaccggcattctgctgtttaacggcctgcagtttttccaggtcctggaagggactgaggaggcacttgagtcgctgttcagcgaaatccaaagcgacccgcgtcatcgcgacgtagtggagctgatgcgcgattactcagcctaccgacgttttcacggcaccggaatgcgcatactggatctccggctgtttgaaaccgatggcgcgctggaggaaattctgcgctttagcacgtttggggtcaccgaaccggtcaacgaccggatgttccggctgcttagcgccttcattgccgacggcggccgctattgcctgcccgagccgctgcagccctctcgctggatgatgatgcccgcgtcaggtacggccgcgccgcagcacctgcccggtcaaccttgccagtttgctctgcaggctattgtcgagccggctaaaaagcgagtttcttcctttgaggctctgatccgcagcccaaccggcggctctcccgtggaaatgtttgccgccattgcggcggaggatcgctaccgttttgatcttgaaagcaaagcgtatgcatttgctctcgccggccagctgccgctcgggaaacatcagctggcgattaacctgttgcccggatcgctgtatcaccaccctgacgccgtaggctggctgatggacagcctgctggcggccggcctcagaccggatcaggtactgatcgaggtgaccgagacagaggtgatcacctgctttgaccagttccgcaaggtgctcaaagccctgcgcgtcgcgggcatgaagctggccatcgacgactttggcgcaggttattccggcctgtcgttactgacccgttttcagcctgataaaatcaaagtggatgcggaactggtacgcgatatccatattagcggcaccaaacaggcgattgtcgcctcggtcgttcgctgctgcgaggatcttggcattacggtggtggctgaaggtgtcgaaaccctggaggagtggtgctggctgcagtcggtgggcattcgcctgtttcagggctttctcttttcccgaccctgccttaacggcatcggggagatctgctggccggtagcgcgccaggcaatggacctgtaaggccgcgcacccgggcatcgtcactgccagtgggcaagcttttcgctcagcgccgccagggcatatcgtaccgctttcgccaccacggtctcacagtcgccggcaaagcacatccgtttggtttcagtctggccgcgaaaattccaggcaaaccataccgtgccggcgggggtaccatcttccccgccctccggtccggcgtagccgctgacggcgatggcgatatcggccccggcgagcgccagaataccagaggacatttcctgaacgcaggcttcgctgacggcgctgtgtaccgccagggtttccgcgcgaacctgcagcacgttgcgcttggcttcatcgctgaaggtcactacgccggtatcataaaatgccgcggtatccgcctgggcacagagcgctgccgccagattccctccggtgcaggactccgccgtggtcagtcgccaaccgcgcgcgatcagcgcccgagccacttcagcggttagttcatgcgtactgtttgcgtcgctatcgatctcgtcagtcattcttcctcctcgccgaaattgaaagaaatagcagactcactgcgtctgttaacagaatagcatatcgatttctttgtcgtcgggaggccatttatattttcaggggggaaaggataaaggcccgcagggcgggcctttaaggtaacatcctcggaacaacggtgaatcaaactttatgttctatcacgcgcccctgattctcgatcgcaattttacgcggtttttcgctctccgggatctcctggtggatggctatttttaagatgccgctatccagttgcgcctgattaatttgggcgtgttcaggaagagagaaactgagctggaaattagcgcggcggatacctttataaatccagcgctcaccgctgtctgtcgaggcatcggtttcctggcgtttcccggaaatatgcagattcccccctacggtttctatttccagctcatcatctttccagccaggcacgctgacgctgagcaggaaattgctgtcgtcgactttctgtaaatcataagccggtaaagtgcccaccggcgtatcgcccgttaactggctgaaaagacggtcaatacgattaaagcgatcggcaaaaagagaatcagcaaataccgggagtgctgacaaggttttgagtgccataattaacctcctgaatattcattcaaaagctcaacataaaggcaagcattgcttgtccgctatataaaataatatctaaggcgcgtttttcaagacccgaaataaaaaatttttcttcgccagcctcagtgaaaaataagcatgccggtggcgaagttacccccgcccgacggcgggggctgtggcgcttctgagtcccataactgatgctgtttaacattcaataaacagaagcgacatgtatatataacttgtttaaggggatgtcaacgtccgaatcgctccccctttgccgtcgtgtattctccccatgaacagcgcgtttagcaacacggctgcctgtcaggatccccttgccaacagcggcgcttcgacgtggcattcgccttgttgccgtcaaccggacgccgctggtgaaaatatacccggccgggtaaggaacctttcatccgacaccgtgcctaatgatctgcatacgcactttctgaggcaccgccatgaccagcatttttatctcaaccaccctgttcgccctcttcgcgtcgatgttgatcggcctgggaatggtgtggaaaagcatttccaacaatcctgataactgattctgttgtacgccgttgctgttcaccctccgcagcggcgggtctaccccgcccctttttatcaatgaccaccccaggtttcgctcaggcgcaatctcctcaaggacccgcgcctgcaaaaggtatttttgaaaaagcaattcatacagtgaataagtaactctgattaatatatttgagaccaggattaacgcatgcaatataagcaatttaagcagtttgtgccaaattagcggtcatgcccgcgcaacgctaaaaaataagctattgattaatataccattaattttactcgccagctcaaagtccaaaattagactcattgcatttgttgattattagaaatatcctaaaggcatacgcatttaatgttctccactttaaatgcatgacaactttcacgatcgccatgactatgcctgatattttaattaacactgaaaacatatttcttaatcgcggaatttgcgaactgcttagcgagatcgcgaaagaagaacacatccgtgaaccgtattccgttgtagactattccacagatatattaggtccgattgatatgctgttcacagaaatggccgctggtgaacattatctatgccacccgtttttcaaaaaacttcctccgcacacgtctatttttattttcgtcgccaccgacagcgctttgcaggttgaacagttaccactttgtctacgcgatgccacttttatcagcatgaacagcgacttgcgccgcgtaaaaaatcagattgcaaaacgtctgacggagtcgacaacatctagttgcggtgggctggaaaaagacagcagacgctgtgtcaaatgccctcggttaaccttgaccaaatcacaactttatattatcgatgcgatcagaacgggaatgaacaatcagcagatagcgcaagaactgggcatcagccataagacggtcttctctcacaaaataaatattatgaaaaaattccaaatagctaccaaacaagagttaacgagattctcatctgttgctcttgcgctttccgcaggaaggatcggttaacgtcggaatttattaaagcgcatcttcatttttcttctttctctaacataggacaggccaaaaaacaaagatgtaaacaataacaccaccgccaggactaataatagtaagttactcataacaaccttttaaaagataaagatgattttttaaataataaggggtggatgttttcaaatacaacccagcgacaaccatttcagacaaaggtaaaactccgtgcgataattctgaaagataataaaaagagtaaaaacgatttcctttatcagacaggcgttagggtaataacgatgaagcataaacggacaatgccaggcctaacgcccagcgtgtactgtcgcgacgtcaggcaagatgacggcctgaaataatggtctactgacgtggaaggagcgtggtatttgggcaggtgaaaacaccgttttgcagctgttctatactgttagtcagacatcacgctggaggtggctatgtgcggacgttttgcgcaagcgcaaagccgggaggaatacctggcgcatctcgtggaagcggccgaacgagatattgcctgggacccggcgcctatcgggcgctataacgtcgcgcccgggacaaaagttttactcctcaatgaacgcgatgagcaactccatctcgatgccgtttactggggctatgcgccaggatggtgggataaaccgccgctgattaatgcccgggttgagactgcagcctccagcaggatgttcaagccgctgtgggagcacggacgggcgatctgcttcgccgacggctggtttgagtggaaaaaggaaggaaataaaaagcagccatactttatccagcgtaaggatggccagccaatttttatggccgcgattggtcggactccgttcgaacgtggggaccatgccgaaggattcttgatcgtgacggccgccgccgatcgcggtcttgtcgatattcatgaccgtcggccgttggtcctggcgcctgaagccgcccgggaatggatgaggcaggatgtcaccggcgcggaagcggcggagattgccagtgacggagccgtttccgccgacgattttacctggcacccggtaacgcgggcggtcggcaatgtgaaaaatcaggggcccgaattacttgcccctctcagcccatgacaaacgtaatcaaagcggcggataacgcatcatattcagcgaagagataattaaattttataccgccctggagtagtgccgaacatccgacggaacaaggctatgaaggcactcacattgtcatatcccagatccagcgctatcgccgtcactggcttgccggcagccagtagctcaagagccctgagtaagcgtatccgctgtcgccattcattgaagctaaaacccgtttcggctcggaatcgtcgcgtgagcgtgcgtgatgacatgccggcccaggctgcccattcttccaacctgcgcccgtcgtccgggtttgctgacagcgcctgcgcgattctgagcaatcggctatcttgcggcattggaagcccaagattaaccctgggaagggaaccaatttcatcaagaataacgccagctaaacgtttttgggacgcattaagctctacaccttgccatgcagccgctcgcgttatcgcttcacgcagcagatttgtcattgagagaacagatggcttatcaggtagctcgccacaggctttggcagaaacataaacactccatcctgaatatggaccgtgcgagcgcaggccgtgcggaacacctggcggtatccagacggcatgtgttgccggtaccacccagcgacaatcaccgccatcgaccgtaagtagcccacgtatggcaccgattaactgcccacagctgtgatggtggcgtggagtctcccgtattacctcagactgacgtaccgcgacgagtaaagtgggtccctggggtgaaaacaccggttcgaatggaatcaatggatcgtgcatattggcgtgtttgaggtgtttaatgtcttttataccgtactgaagccagttagtcgattgtaaagtattcatcactttcacagaggactaaccatcaaaatgattactattactagggtattggatgacattatcaaccaccaacagataccactggatcggatactcagtcgctattttagtcccggttatcggcagcgcactgataacaagtgggaaggattagatggctttgctcagcatgcgcgtagactccgggaaattatcgccttcgctaaaattgagttacatgacgaactttgtaacgggaatctttatgccacaaggcatcgcgttctgtgcaccaggcgcagcggagaagaggtggacatggaagtttatatgttcgctgaaatagatgattccgggcgcttcattcgtatcgaagaagccacgctaatgcttaaagggagagagagcgataaagatttaggcagcgtgaggtaaaagaaatataaggttacgactagatcagacaaaaaaccgggcagcgcgcccggttatcttgtcagactaaaattgccctacgcactcaacccgcgatttttcagcatcggctcaatctgcggatcgtgcccgcgccactggcgataaagttcagctaaatcagtgctgttcccgcgtgataaaatcgcctcacggaaacgctgaccgttctcacgggtcaaaccgccctgctccacgaaccattgatagccgtcgtcggccagcatctgggtccacagataggcgtaatagcctgccgcatagccgccgccgaagatatgggagaaatagctgctgcgatagcgcggggggaccgccgccagatccaggttctcttcccgaagcaccagctgctcaaacgcgtccacctcctccggtaatgccgaggtcgacaggctatgccaccgcatatcgagtaacgcagcagccaatagctcgctcatgtcgtaccctttattgaaggttgccgcacgcaacatattgtcgcgtagcgcttgcggcatcggctccccggactggtagtgcttcgcgtagtgggcaaacacctgcggctggctggcccagtgttcgaagatctgcgaaggaaattcgacaaaatcgcgcggcgtattggtccccgagagactggcgtagcgctggctggcgaacagcccatgcagggtatggccgaactcatgaaacagggtgatcacctcatcccacgacagcagcgcgctctgccctgcctgcggacggacgtagttgcagacattgtagataaccgggcgctgcgcgcgcagagtcgactgttcgacaaacacatccatccatgcgccgccgctctttgagtcacgagcgtagtagtcaccgtaaaacagcgccatcccttcgccgttgtgatcgaagatctcccagacccgcacatccgggtgatagaccggtatatcgaagcgctcaacaaagcgcagcccaaagagctgcgttgccgtccagaagacgccgtcgtgcagcacccgctcgagggcaaaatagggtttgagctgcgcgtcatcaatggcataggcagcccgccgcacctgctcgctgtagtaaagccagtcccatgccgtcgcgcgaaaacccccgccttcgttgtcgatcacctgctggatgtccgccagctctcgttccgcccgcgcccgcgccgccggcgctatccggcgcataaagcccaatgcctccgccggggaagccgccatttgatcggtcagcgcccagctggcgtaatcagcggcgcccaacagctcagcctgctgcgcgcggatcgccgccagccgcagtaccaggtcacgcgtatcatgctcatcgccctgctgattgcgggtccagccggcggcgaagagattctcccgcgtttgccggtcgcgcagcgcaagcagctgcggctgctgggtggtattggtcagcgtcagcaaccagcggtcgctaagccctctttcacgcgctgcgtcagccgccgccgctatctcctcatcgctcaggccagccagttgatgccggtaatcaaccaccaggccgccgctttttgccgctcccagcagtcgctgctggaactgactttgcagcgtagccgcttcggtgttcagtgtgcgcagcgccgcctgctgctcgggagccagcgtcgccccggcgtgaacaaaacgttgccacgtcagggtcaggagacgataggactcgctgtccagcgccagcgcgtcgcgctgctcgtagacgctgttcacgcgctgaaacaaggccgcattaagccagatgtcattccccagctcggcgagttcggcggaaaattgttcatccagtgattgaatataaggattggtatgggcgccagccatggcgaaaaagacccgcgtcacccgcgccagcagctgaccactctgctccagcgcctcgagcgtgttggcgaaactggccggctgcggattgtcgataatagcgcgaatttcggcccgctgctgccggacgccctcatcaaacgccgggcgatagtggctgtcgtcaatcacatcgaacggcggcgcctggtaaggcaacgtactgacgctaaaaaaggggtttcgttcggacatctttctctcctgtacaggctaatgctgtaagattaggcctctccttaaggggtcgcaatgatttccgttaccggtcgccgcctgtgcgtgctatggtatgaaaacacaaaaagcgttgaggaacagtaagatgattatcatggtcaccggcgccaccgccggttttggtgaaagtattactcgccgttttatcgctaacggtcataaagtgattgccaccggtcgtcgtgaagagcgcctgaagacgctgaaagacgagctgggcgataacctttatatcgcgcaacttgacgtccgcaaccgcgccgccattgagacgctgattgctgacctgccggccgagtggcaggctatcgatgtgctggtgaacaacgccggcctggcgcttggtctggagccggcgcaccgcgccagtgtggaagactgggaagatatgatcgacaccaataataaagggctggtgtacatgacccgcgccgtgctgccggggatggtggagcgcaatcgcggccatatcatcaatatcggctctacggcaggcagctggccttacgccggcggaaacgtctatggggcgaccaaagcctttgtccgtcagtttagcctcaatcttcgtaccgacctgcacggcaccgcggtgcgcgtgaccgacatcgagccgggtctggtgggcggcaccgagttttctaacgtccgctttaagggcgatgacgctaaagccgaaaaagcttacgaaaatacccaagcgctaacgccggaagatgtgaccgaggcggtctggtgggtcgccaccctgccgaaacatgtcaacatcaacaccctggagatgatgccggtgagtcagagctttgccggactcagcgttcaccgtcagggctaaccgtcagccacccggcctgcgggccgggtatgggcggaaacgcaaaaaacgcgtaaaatagtgcgcataaccccctaaaaagtaaccatcaatggccgcagaatcgcaactgaatccgacgcaacccgtcaatcagcaaatttatcgcatcctccgccgggatatcgttcactgcctgatcccgcctggtacaccgctgtcggagaaagaagtctccgtgcgttttgcggtgtctcgtcagccggtgcgcgaagccttcattaagctggcggaaaacggacttatccagattcgtccccagcgcggtagctacgtcaataaaatctcattgtcgcaggtgcgtaatggttgcttcgtccgccaggcgattgagtgcgcggtggttcgccgtgccgccggcatgattaacgaagagcaactttatcagctggaacagaatcttcaccagcagcgtattgccgttgatcggcagcagttaaacgactttttcctgctcgatgatgaatttcaccagaagctgtcgattatcgccgactgtcagctggcctgggagacggtggaaaatattaaagccgccatcgatcgcgtccgctatatgagtctggaccatgtcacctctccggagatgcttctgcgccagcatcatgagattttcaccgcgctggaaaaacgcgatgccgaggcggtagaaaaagccatgagtatccatttgcatgaaatcagcgaatccgtactgctgattcgccaggagaaccgcgactggtttagtgaagaataagagtcagacggctgccggcatggccgacgcagccgtcgtcattgaagggattatctaacgaccaataccggcgttttggcgtagcgcagaattgactcggcgttggagcccagcagatgggtggagatccctggtttgcgggaaccaatcacaatgacatcgaactcttcgttgttactgatagccagaatttcgtcacgcacgttgccaaagactacgcgggtatggatccgcgtcatggggatggcgaacagtcgcgccacctcgcgcatttttttctccgactcttcttccatataggcttcaaacttacgaatatccgccgtaaaaccgcgcaatagcgaacggctgctgttcggcagaacgttgagcaaggtgatctcgccattttcggccgaagcgagaaattccgcgtgacgcaccgctttatcgcttaaatccatttcaaagacatcaacaggcaataaaatttttttatacatggcccgtactccttttgcagagaaagttctttttcaataacttaactatgccattattgcggtgaaataccagtcattgttcggaaaaataacagctaattatctttagtaaatcagggaaatatagagttatgtatagacattgcgttcgatcatattctgcgtctgctaaaaccgatcgctagcaaaaaatagacatcagcggagtatcgtagaaataactgaagagccggtgtcgaccccgggaccgacaccggaaaaagattattgcgcggcggcccacgcggcgacggtagctttagccccctgccgctgcagcgctaagtaggcgcgggtcaccgccgtgacaaagcgtgactcctgcggcagttcgacgccgaaaatcgcctcaatacccagcagcgttttgactcgcgcttcgccatcggcgctggcagccaccgcttgctggataaccggcaacaacgggtcgcatatctcgattgcctggcccgcatcgtcaacgccgccaacgtagcgcatccacccagccacgcccagcgccagcagtgtaaaatcacgctgatgcaccagatgccagcgtattgagtccagcatgcgctggggcaacttctggctgccgtccatggctatctgccaggtgcggtgcttcagcgccggattgcagtaacggtcaatcagcaaactggcatagcgtgacagatccaccccctgcaccttcagcgttggtgcctgttcgtccagcatcaacgacagcgccgcgcgacggtagttatcgtcctgcatacagtcgttgatatgctgataaccggccagatagccgagataagcgaggaacgaatggctaccattgagcattctcagcttcatctcttcgaaaggcaccacgtcggcgaccagttccgctcccgctttctcccactgcggacgtccggcaacaaagttatcctcaatcacccactgacggaaaggttcgcaggccaccccggccgggtcgcgaaccccggtcagctgggtaattttatcgagggtttcggcagtcaccgccgggacaatccggtccaccatggtcgacggaaaggtgacattctgctctatccatgcggcaagatcctcgtctaaagcccgggcgtaggcgcagacgacgttgcgcatcacgtgaccattttccggcatgttatcgcaggacatcacggtaaaagcaggcaggccggccgcccggcggcgagataaggcctccaccactacccccgccgccgattttggctggtgcgggttatgcaaatcggcggcgatcaacgggtgatcgagctgcagttcgccgctggctggcgaatggcaatagcctttctcagtaatcgtcagggagacaatggccacctgtggctgacacatcgccgccagcaccgcttcgagaccatcaaccccggcgtgcagcgcctgcttcaccacaccaaccacgcgcgcggtccaggcgtcggcggacatttcggcgacggtatacagcagatcctgctgctggagatcggcgatctgctgctcgccgccaatcagattaacttcggtgtagccccagtcgctgccgtgctcgctggccagtatatcggcatacacagcctgatgagcgcgatgaaacgcgccaaaaccaagatgaacgatacgggggatcagtgcgctgcgatcgtaggtcggcagcgtggcgttagcggttaagagggtgttttccatgatgactctcgttgttatgtagcccatcaaccattctcggggagaactctcgaggagaatgcctttgtgcctcaaccatctcacgcaattggtataacatctttgatttctgtcaactaccatacaagaagatctcgcctgataaagcacagggcacatggctgcaatcgccgcagtgacaggatagcgcaggtaacggaaggagaagaacatggcggccgcgcgtccctgcgggcctgctgttgacgaatcgccgagcgttgctaatcgatgcgagttttgacgataaagaagtagcacagcgccccggcaaaggtcaccccggcggcgatcaccagcgccagattgaaagagtgagtcgtatccactacccagccggtcacgatcggcgcgaaagaggcaaacacaaagctgccgaagttctggatcgccgccaccgaagccactttatgctccgccaccattacctgcaccagcccccaggcggacgtcccggcaaaatgaacgcaaaacagcgccatggagataaaagccaccgcctgggctggcgtggacgattgcaccaccagcaaggtgcccagcgccgacagcaccagaccgataacaatcgccgttttgcgggttttcgcctgatcgtagcctctgcgcgccagggcatcgaccaccaggccgttgacccacatccccaccgccgcggcaagaaacgggatcgccgccacccagccggtacgggccaggcttaacccctgctgcgcctgcaaatagccgggcaaccaggcgatatacagccagccggtgtagttcacaccggaaaagccgaggatcatcccccaggtagtccgccgtttaaacagagccagccattcgctaaacttcagcgccgggcgggccgcctcctcactggccagatactgctgctcctcctcctgcagggtaaactgccgacggttacggtagcccacataccagcacaggccgaccacgatcccggctaaaccaatcaccacaaacatcgttcgccaaccccaggccaactgcatgatgaccagggccggcggggcgatagcctggcccagcaccgtcgaggagttgaatattcccaccgccgtgccgcgctctctttgcgcataccagtcgttgatcgatttcacgccggcaggcataaacggcgcttcgccgatcccgaggccaatgcgcagcagaataaaatgcgagaacgaattgaccatcccggtcagggcctgcattgcggaccagaaaatcagcccggcgcccagcacaatccgtggccccaggcgatccaacaaaataccggagggcagttgcgcgaagccgtaagagagcgaaaaggcggagagcagcaccccgaactcggtggcgctaaggcccaggtcggcgcgtatcgcctccccggcgacgctcagcgaagagcggtcaagaaagttgacgataccggcgataaacagcagcgtcagggtgatcttctgcacccgacggatgcgtaacggcgtcgccccggtccgggcggcaagagtctcgatagccatcgttgttccttacagagtcatatgaaataggatgtctgataagtaaggcaacaggtcgactaccatacaagaattagagttgaaaaaagcggcagggatcacacatgacgggcttaggcccgtccccaccccgccacgatgattagcatgccgcacagggcgatggccgctcccgcccagtcataatgggttaatttgaccccatcaacgacccgcagccagagcaatgcggtacaaacgtacaccccaccgtaggcggcatatacccgcccgctggcggccggatggagcgtcaggagccagacgaatagcgccagcgccagggcggtggggatcagcagcagcggcgttgccccgcgcttgagccatagccacggtagataacagccgacgatttcacacagagcggtagcaaagaacagcagcgttgttttgagcattaaaagattcgtaaaagagacaaagcgttgaaccattctacgcgataatagcttctgccccacgctgttttgccggctatgcccgacaaaagagctgtagtaaactgaatctgagggttaacccatcacttaaaggaaatcgtgatgaacatgacactgaacaaacgctggtgcctgaccgccattctggcgttaagcgctgtggtctacacctccagctcctatgccgccaccgaccggctggtgattgaatctggcgacagcgcgcagagccgtcagcaggcgtcgatggaaaaagagcaatggaacgacacccgcagcctgcgccagaaggtgaacaaacgggcggaaaaagagtgggataaagccgatgtcgctttcgacgcgcaggataactgccagaagagcgccaacgtcaatgcctactgggagccaaacaccctgcgctgtcttgaccgtcgcaccggccgcgcgatcaatccctgagccgctccctgaccacgctggcgcctgcgggcgccgcctttctgtaatcccttttccgttttgaccacaggaatctccatgaccgacgcgctacacgtcaaactccgcccgcttgagcgcgaagatttgcgcttcgtccaccagctcgataacaacgccagcgtcatgcgctactggtttgaagagccgtacgaggccttcgttgagctctccgatctgtacgacaaacatattcacgatcaaagcgagcgccgctttgtcatcgaatgcaatggcgataaagccggactggtggagctggttgaaatcaaccatgtgcaccgccgggccgagttccagatcatcatctcccccgacttccagggaaaaggtctcgccacccgcgccgcacgcctggcgatggactatggctttaccgtgctcaatctgtataagctgtatttaatcgttgataaagagaatgaaaaagcgatccatatttaccgtaagctcggctttatggtcgagggtgaactgatccatgagtttttcattaacggcgagtaccgcaacaccatccgcatgtgcctgttccagcaccagtatctggccgagcacaaaacgtccgggccgtccctgctgaagccgacggctcagtaataatcgatacggtttttaatggtgtagtggcgggtcagcggcggctggacgctttcatcgatcacctgcagctcacagctcagcggattgtcgtgatcgtcgtagtcgcaggtctgacgcaccgtgcccagcgtgcgatcgttgaaggtgctgatggcggtatagtccaatttcttacgcggatcctttgacggcgttgaggcgacggtaaatcgctcctctttggcggtggtggtttttcccagcggatagccatcgctgtcatagcggtaggtggcggtggtctctttgccgcgtgcgctgataataaaaccgttatcatccgtctcccaactcaccccggcggcaggcatctccgccagctgacacttgccctgcaggcgcagccgcttctcgtgggtgcgcccgtcgacgtaatagttggcgtccagcagcagcgtggcgccggttttgttctccacatcttccagggtcagcagatcgaaacacccttcccttgagagctgagcgctcaccttcttgaccaccacatcgtgttcatccagcagcgtctggctaaaatctttcaccggcccgcgcaggggatcaaactcaaactcattggaaaaactcgccatttccggggtgaaggcgtccggggcgcttttacggtcgcatgccgtcagcagcagcgctgccgggatcagccaatacaatcttttcacagacgattccttttgtgtacatccgatcatattagcaaatacaattgtttacaccagttctgctatgcttaaatctggataacatcgataaggagcgtaagatgaaactatccctctgcaccggcgctgcgctactgctgtgctccacggccgtactggcggctcccgactcctgtgaacgggtcaaaagcgacatccagcagaagatcatcaacaatggcgtaccggaaaccgccttcagcctggccattgtgccaaacgatcaggcagaccagcccggggttcaggtggtcggtcattgcgccaacgacaccttcaaaatcacctatacgcgtaacagcgacagtcccgccgaaaacgacgctcagtaagccctcttcggtttcaaatgaaagatcttatccctgcattgaccagggataaggtctactggctacccataacgtattatcgctcacccctgcgtctgttaatgacgtggcggtccttctccgcacagcataactatcatggagtgagcaatgtcgaatcaggaatctcccggcggcgtcagccgacgcgcgctactaaaatctacagccctcggctccctggcgctggccgccggcgggctgaccctgccctttacgctgcgccgcgccgcggcggcagttcagcaggctacaggcgacacaacccgcattgtctggggcgcctgctcggttaactgcggcagccgctgcgccctgcggctgcacgtgcgtgatgatgaagtggtttacgtcgaaacggataacaccggcgacgaccgctacggcgaccatcaggtccgcgcctgcctgcgcgggcgttcgattcgccggcgcatcaatcatccggatcgccttaactatcccatgaagcgcgtcggcaagcgcggagaaggcaaatttgtccgcatcagctggcaggaggcgctggataccctcgccgaccgcctgaagagcgtggttgcgcagtatggcaacgaagccgtatacattaactactcttcagggatcgtcggcggcaacatcacccgttcgtcgccttccgcgtcgccggtggcgcgtttaatgaactgctacggcggctcgcttaaccagtacggtacctacagtactgcgcagattgcctgcgccatgccctacacctacggcagtaacgacggcaacagcacctcggatattgaaaacagcaagctggtggtgatgttcggcaacaatccggcggagacccggatgagcggcggcggcattacctggtatctggagcaggcccgcgagcgctctaacgcgcgaatgatcgtcatcgatccgcgctacaccgataccgccgccggtcgggaagatgagtggatccccattcgccccggcaccgacgccgcgctggtggccggtatcgcctgggtgttgattaacgaagatctggtggaccagcctttccttgataaatactgcgttggctacgacgagaaaacgctcccggccggggcgccggcgaatggtcactacaaagcctatatcctcggcgagggcgacgacgggatcgctaaaacgccgcagtgggcctcgcgtattaccggtatccccaccgagcgcatcattaagctggcgcgcgaaatcggcatgagcaagccggcctacatttgccagggctgggggccccagcgccaggccaacggcgaactcaccgcccgggcgatcgccatgctgccgatcttaaccggcaacgtcggcatcaacggcggcaatagcggcgcccgcgaatcaacctacaccatcaccattgagcgcctgccggtgctggaaaacccggtgaagaccgccatctcctgctttacctggaccgacgccatcgcgcgcggtccagagatgaccgccagccgcgatggcgtacgcggaaaagagaagctggatgtgccgatcaagttcctgtggaactacgcgggcaacaccatcatcaaccagcactccgacatcaataagacccacgaaattctgcaggatgaaagcaagtgcgaaaccattgtggttatcgacaactttatgacctcgtcggcgaaatacgccgacctgctgctgcccgacctgatgaccgttgagcaggaggatatcattcctaacgattacgccggcaatatgggctatctgatttttattcagcccgccacctcagcgaagttcgaacgcaaaccgatttactggatcctaagcgaagtggcgaaacgactcggcgacgacgtgcatcaacgttttaccgagggacgtacccaggaacagtggctgcagtatctgtacgccaaaatggtggcgaaagatccggcgctgccggcctacgaggatctgaagcgaatgggcatctacaagcgcaaagacccgaacggccacttcgtcgcctatcgcgacttccggcgcgatcctgaagcgcatccgctcaaaaccccgtccggcaaaattgaaatctactccagccgactcgcagagattgccgcccgctggcagctggagaaagacgaagttatcagcccgctgccggtctacgcctccacatttgaaggctgggacgatccgctgcgcagccagtatccgctgcagctgtttggtttccactataaagcgcgcacccattccagctacggcaacgttgatgtattacaagcggcctgtcgccaggaagtatggatcaatccgcttgacgcggaaaaacgcgggattaaaaacggcgatatggtgcgcgtttttaatcagcgcggcgaagtccgtcttccggcgaaagtgacgccacgcatcatgccgggggtctcggcgatgggccagggcgcctggcacgacgccaatatgaccggagatcggatcgaccatggcgcctgcatgaataccctgaccacccaccgcccgtcgccgctggcgaaggggaatccacagcataccaacctggtcgatatcgagaaggtttaaggagtaaaccatgagcacgcaatatggattctttatcgactccgctcgctgtaccggatgcaaaacctgcgagctggcctgtaaggactacaagaacctgactccggaggtcagcttccgccggatctatgagtatgccggcggcgactggcaggaggacaacggcgtctggcagcagaacgtgtttgcctattacctctccatcgcctgtaaccactgcgaagatccggcctgcaccaaggtctgtccgagcggcgcgatgcataagcgcgaagacggttttgtggtggtcaacgaagaggtatgcattggctgccgctactgccatatggcctgcccgtacggcgccccgcagtataacgccgacaaaggccatatgaccaaatgcgatggctgtcacgagcgcgtcgccgaggggaaaaagccgatctgcgtcgagtcctgcccgctgcgggcgttggatttcgggccaattgccgaactgcgcgctaagcacggccagctggccgcggtagcgccgctgccgtcggcgcactttacccggccgagtatcgttatcaaacctaacgccaatgcccggccgtgtggcgataccaccggttacctggcgaacccgaaggaggtgtgagatgggaaacggatggcatgaatggccgctggtgctgtttacggtgctgggtcagtgcgtggtcggcgcgaccatcgtcagcggtcttggctggctggcgctgggggaccaacgggaagcccggcggcggctggtgcgcaatatgttttttatctggctgttgatgggcattggttttcttgcttcggtgatgcatctcggttcaccgctgcgcgcgtttaactcgctgaaccgcatcggcgcctcggcgctgagcaacgaaatcgccagcggcgctctgttcttcgccgtgggcggattctggtggctgctggcggtgctggaaaaaatgccggcgacgctgggtaaagtctggctggcgatcgccatgctgttagggctgctgtttgtcctcgcaatgacccgggtttaccaaatcaataccgtgccaacatggtacaatggctacaccaccagcgcgttctttctgacggtgctcctcagcgggccgctgtttgccgccctgctgctgcggctggcgaaagtcgactttaacggctggttttttgccggactgagcgtggccgcgctggtcatcagcgccgcagttatcattatgcaaagcgccgggctcagtacccttcacagctcggttcagcaggcggccaacctgctgccagattacggcaaactccaggcgctacgcctggtactgctggcgctgggcctcggctgctggctatgtccgctgatccgccgccagccgccgcgcgctacggggctgctgatcggcctgctgctggtcttgatcgccgaatgtattggccgcggcctgttttatggtctgcatatgaccgtcggtatggcggttgccggttaatgagacggcgcgcaggcgcgcgccgcagaaaggaataagtgatgatgccgatcccaaatcgcgacgccgtcgcgttaagcgcccgcaccctgggcgcgctgttctcttatgcgccgaatagcgcggaaattgcgccgctggtcgccgccttccaggacgggagctggcagcagcagtggcccttcccggtcgcagccccgctggcgtcagggtttgccgcatcggctgaagaaacgttgccggaagcctggcagcgcctgtttatcgggccatgggccctgccggcgccgccctggggctctgtctggctggataaagagtctgtgctgtttggcgattccacgctggctctgcgccagtggatgcgcgagaacggtatcgcgctggaggccgatggcaacgaaccggaagatcatttcggcaccgtgctactcctggcggcatggttgtgcgaaacggagcaggatgcgttgttcgctcagctgctggcctggcacctgctgccgtggtccgggcgtttcctgagtgtctttgtcgaccatgccgcccaccccttctatcaggcgctgggtcagctggcgcaggcgactctggcgcagtggcaggagaatctgccgatcgccgtggcgcaaaaaccgctctatcgttaacccttcgccgcgccggtatccggcgcggttttattttgccgcttcccagcctttcacccgcacttatcgcttttgcatctaaggttattccctatcacaataagccaatgttttctgaacctcgccgtgactaatgcatcgtcttcatccctatcctgatgtgcaggtgatgtttcgccgcctgctgatcgccaccctgattggccttctcgccgccctggcggtggcgctgtttcgccacgctatggtggtgctggaaacgctgttgctcagtaatgacagcgggagcctggtcaacgccgcacagtcgctgccggcgtggcgtcggctggttacccccgcgctgggcggcctgacggcgggaaccttactctggctctggcaacgacgcagcgtcgcgcgtccacatgccgccaccgattatatggaagccctggagaccggcgacggctgtttcgatacgccagcaagcctggtgaaatcactggcgtcattgctggtcgtggtgaccggcagcgcgattggccgggaaggcgccatgatcctgctggccgcgctggcggcctcgctgtttgcccgtcgcttcacgccgcagagtgaatggaagctatgggtcgcctgcggcgcggctgccgggatggccagcgcctatcatgccccgctggccggcagcctgtttattgctgaaattctctttggcacgctgatgctggcctcgcttgggccggtggtgatctcggcggtgatcgccctgctgttgacgcagtttcttaatggcggcgccgcgccgctgtatcacgtcgtgttacagcaaaacctcagcgccctgcactatggcttaatgctggcgactggcctgctggccgggctgtgcgggccgctgtttatctggctgatggactacagccaccgcggattcgttaaactgaagctggcgccgccgtggcagctggcgctgggcgggctaattgtcggcggcttatcgctcatcaccccggcagtatggggcaacggctacagcgtagtgcaaagctatttgctgctgccgccgtccggtgcgctgctggtgggcatatttatctgcaaactgctggcggtgctggccagcagcggctccggcgcgcctggcggggtcttcaccccgacgctgtttgtcggcctggcgatgggcatgctgtttgcctgcttcagcaggctgtggctaccgggaagtgaagaaatggccatcatgatgggtctgaccggcatggcggcgtttctggccgccacgacccatgcgccgatcatgtcaaccctgatgatttgcgagatgaccgggcagtatacgctgctgcccggtctgctgataacctgcgtcgtgtcgtctgtgctgtcgcggacgttacgccgggattcgatctatcgccatcacgttgccgagcatgtctaagtcgacgtagcggctcagctcacgctgttcggcgcgcggtagataaggcagctcgccgatcagcggcgccggcagctttttgctgaggacatcgatgatttcggcgtagtgcgccagaccggggttgatccgattggccacccagccaatcagcggtaaaccgtcattggcgatcgcctgggctgtcagtagcgcatggttgatgcacccctcctggatccccaccaccatcagcactgggagctgctcctgaaccacccactcggagagcggccgcaggtcgttcatcaggctgcgccagccgccggtgccttcaaccaccacgtgttcgacctgcgcggccagacgctgcaaaccatcggacagcagaccgtagttgatcgggcagctatgcgccacgctgctctcgtcttcgcttaaggcgatggggttgacagcctcataaggtaacgcgagcgtggagacgctctgcaacaccagcgcatctttgttacgtaaaccgtccggcgtctctttgctgcccttcgccacaggcttatacccggccacgcttttgcctctggcagcaagtgcctgcaacagcgcacgggaaaccactgtcttcccgacagaggtgtctgtacctgtaataaagaaacgcttaaacatcactaaccccacagttttgtcgatgaaatatacgggagagaaataatcaacggtgggcaaagtctacgtgaagccgtctgaggtcagcttgagatagcgcaatttttggtgtgactatgaaaaaatgttaaccctgtaacagtcgtatgagtaaggatccgttatagagtgcatctttaaccagcgccgcgccagccatcgttccgcggttggagaattgagtactttcaacggtaatatgccggctataggctgggagagattgttgccgaatacagctggaaattgccggaaaaagaatttctgccgccagattgaacggcgagccaatcagaattttctgcggattaaacagattgaccatgatcgccagaatccgcccaacgtgattacccacgccgctgatgatgtcccgggctaacaaatcgccctgcagcgccgcctgacaaagccactccacgctcagcggacgctggtgcagcagcgagctcatcgactgcgccatgcgcatctgcgccagctccagcacgctttctacgctggcaattgtctccaggcaaccatggttgccgcagtaacagcgtttgccgtagggatcgacctgggtatggccaatctccaccaggctgctgctgccggcgtgcagcaggcgcccatcggtgatcaccccggcgccgacgttatgatcgatgaccacctgaatgacgtcccgggcgccgcgcgaggcgccaaacaaagattccgccatggtccaggcgctgatgtcatgctgaatatagactggcaccccggtatgattggccagcgcttcgccgagcgggacatctttaacatcctcataaaacggcatgcgatgaataatgccattttcggtatcgataataccgggcatcgtcatggcgatggaggtaaggcgttccagcttcttttgatggcgaataaagaagcgatcaatatggtcgataacgcgcgtcagaaacggcgtgctgtcggtgagcgccagctccagctgatcctccaccaccagctgactgcttaaatcacgcagcgaaagatggatctcaccgcggctgatgcgcaccgccagatagtgccatgcctcggtctccaccatcagccccaccgccgggcggccgcggctgccgggctcctggatctcggtctcctgaaccagatgcgcttccagcatttcgcggacgattttggtgatgctggccggcgccagttgcgcaaatcgggaaaggtcgatacgcgataccgggccgagctgatcaatcaggcgatacacggcgcccgcattggtctgctttatttgatcgatatggcctggttgactatccgctaccaccattgactcccttattttcgcgcttcgaaataaactttcggctatggtgaagcacttcgacggtgaacgtcaaatttttacttagccttgtgatttaccgcacatttccagccccttttcgcctcaattatgctcgcttttccaggagagcagcgcctcacgaaagcgttttgccagtgccccttgctcatggtgtttagaccacaccagccacatctccgataccgcatcctgttcgtcgatcggcagccagcgcatttcactgagctggacgcgctgaaaggaggccgggaggatcgatacccccaggccggcggccaccagaccaataatcgtcattgcctcccccacctcctgggcaatcttcggcgtgtggccgtagcggcgcagcaagccgaggatgtcgtcatacaggccagtgccgacgtgcgggtcgaaaaagacgaagggctcgcgcgccagcgccgccaggctgaccgagggctggcgggccagcgggtgattcgccgggaccatcgccaacagcggctcgcgcagaacccgctcccacgccagggtgtccggcagttgagtattgcgcagcagccccaaatccagagccccctcgctcaggggcactatctgttcgcgggtgttagtctcgcgggtgagaatatgcacatccggaaggcgttggcgaaacatcgatagcgtatcggagacggccttaataaaaggggccgaggaggtaaagccgatgcgcagctcacccgtttcgccatggtgtagacgggcggcgcgagcagccgcctcatccacctgggcgaggatttgtcggctatcggcgagaaactgctttccggccgccgtcaggctgacgctgcggttggtacgggcaaacaggcgagcgccggtctgctgctcaaggatctgaatctgctggcttagcggtggttgagagatgttcagtcgcgccgcggcgcggccaaaatgtagctcctcagcgacggcgacaaagtagcgcaaatgacgcaactcgatattcatatttaaaacgtcttatttgagattattaatatattagacagaatatttacattttcataccctaaaaatgtgagctgaatggtcacaacactctgttggtaagcagcaacttctacgcaaggaattctctgtgagtcgtacaacaaccgttgacaccgtgccggcgggcgaggtcagcgtcgctggtgcatcccgcccggatccgtttattaaacgtggcaccccgcagtttatgcgcgtcactctcgcgctgttctccgccggtctggccacctttgccctgctctactgtgtgcagccgatcctgccggtgctgtcgaacgagtttggcgtgtcgccggccagcagcagtatttcgctttcaatttccacggcgatgttggcggtgggcttgctgtttaccggcccgctgtcggacgctataggccgcaagccggtgatggtcaccgccctgctgctggccgcctgctgttcactgttgtcgactatgatgaccagctggcacggcatcctgattatgcgcgcgctcatcggcctgtcactgagcggcgtagcggcggtcggaatgacctatctgagcgaggagatccaccccagtttcgtcgccttttcgatgggactctatatcagcggcaactccatcggcggcatgagcggccgcttgctgaccggggtctttaccgatttcttcggctggcgcgtggcgctggcggcgatcagcggctttgcgctggccgcggcgattatgttctggcgtatcctgcccgagtcgcgccatttccgcccgacctcgctgcgaccgaaaacgttgctgattaacttccgtctgcactggcgcgaccgtggcctgccgctgctgttcgtcgaaggttttctgctgatgggcgcttttgtcaccctgtttaactatattggctaccggctgatgatgtcgccgtgggcgttaagccaggcggtggtaggcctgctgtcggtagcttatctcaccgggacctggagttcaccgaaggcaggggccatgaccgtacgctttggccgcgggccggtgatgcttggctttacagcggtgatgctctgcggcctgctgctgacgctcttttcttccctgtggcttattttcatcggcatgctgctgttttccgctggcttcttcgccgcgcattccgtcgccagcagctggattggcccacgcgcccgccgcgcccgcggtcaggcatcatcgctgtatttgttcagctattatttgggttcaagtcttgccgggacgttaggcggggtattctggcatcactacggctggaacggcgtcggtgggtttatcgcgctgctgctccttgccgcgctgttgaccggcacctgcttacatcagcgactgaaatagtcgcgtgtgacgtggcctgcgggccacgtttcaccacatgcccattatggaagacaagcccatcagctctctgacggcatcaacggacagtagtgcaataaacagccaggtgaacggattcataaaccacccccgaacctccagacctgtgtaatcgatcacagtttagtaccgatatgttaccgttttctgtcacaccgatcacagaggtgagcttattgcttattctcccgccatgtgtctttcccttcccctgtgcgcaacgctcgacccgccgggcgtatcaggatagtgtagaggcaaagcgataatctctttattcacctgtcacggaccgaacgccactatgactgaaaatacgccttatcagcagcttacccgtacctttcagcgcctgtcgcgcttttcgcatctcgccgccatcgccggctgggatatgttcgcgatgatgcccccgggcgggagcgtcgcccgcggcgaagcgctggccgagctcggcgtgctgcagcatcagatcctgaccgataaaaaagtgggacaatggttacaggaggcccgccagcaggatcttaatgatgttgaacaggccaacctgcgggaaatgcagcgtcagtacgatcaggcggcgctgctgccggagagcctggtggaagcaaaatcgctggccggcagccgctgcgagcatgcctggcgcagccagcgtcccgccaatgactggacgggctttgccgacaacctacgcgaggtggtcagactgagccgtcaggaagcgcagatccgcgccgatgccaggggcggctcacgctacgacgcgctgctggatattttcgaaccggatatgaccagcgcgcggctggacagcctgttcgccgatctcaaatcgtggctaccttccctgcttagccaggcggtggagaagcaggcgaagcagacgctaatcgccccgcaggggcctttccccattgctgaacaacgggagctgggcctgcaggcgatgcgtatccttggctttgacttcgacggcgggcgcctcgacatcagcgcccacccgttctgcggcggcgtaccccaggatgtgcgcatcaccacccgctacaacgaaaacgacctgctcagcgctctgttcggcgtgatccacgaaaccggccacgcccgctacgagcagaatctacctcgcccgtgggtcgaccagcccgtaggactcgcccgctccaccgctatccacgagtcgcagagcctgttctttgaaatgcagctgggacgcagcgagcggtttcttaaccgcctgttaccggcggtgcgcgagcggtttggcgatcggccggcctttagccaggataattttgtcgcctggaatcagcaggtgaaacccggctttattcgcgtcgatgccgatgaggtgagctacccggcgcatgtcatcctgcgttatgaaattgaacgtgcgctgatcgacggcgagattgaggtagatgatatcccgtcgctgtgggacgagaaaatgcagcactggctggggctgtcgaccaccggcaactatcgggatggttgcatgcaggatattcactggaccgacggcggattcggctatttcccttcctataccctgggcgcgatgtatgccgcgcagctgatggccgcggcccgccgcgcgctgccgacgttagatcgcgatattgaggaaggcgatttcagcgccctgttcgactggctgcggcagaatatctggcagcatggcagccgcttcaccacctcgcagttgattcagcaggccaccggtgaggatcttaatagccgctacttccgcgagcacctgaccactcgctacctgtaatcatacgcgccgggctacccggcgcgtcctgtcgttcccgccttgtacattcggttacacgccgataccaaacactcacggaaagctcgaaaagacaagcatatagtgatttcaccggccccgcagtggggttgaaattaagaaaacttttcgaggatatcagaatgaaaaaagtattagctctggtcgttgccgctgctatgggtctctcttccgccgctttcgctgctgacgcagtaagcaccactcaggcaccggctgccacccacagcacggctgccaagaccacccatcacaaaaaacaccacaaagccgcggcaaaaccggccgcagagcagaaagctcaggctgccaaaaaacacaaaaaagcagaagctaaaccagccgctgctcagaaagcccaggccgctaaaaaacacaaaaaagtagcagctaaaccagctgctccgcagaaagctcaggcggcgaaaaagcatcacaaagctgcggctaaaccggcagcccagaaagcgcaggcagcgaaaaaacaccacaaaaccactaaacaccaggccgctaaaccgactgcacagccggcagcataattcctcccggtgaaccaaccttcttaataatcggcgctgtttcagcgccgttttttctggagagcactatgctgcggcgctatcgttttgagctcatcctgatcctgctaattatatgcgcagtggttgcaacccgttttttcctctcttaattatttatcccgcgctcgcattttgctgcttctaccagcttttcattaaaatgaataccgtgcggctatcgctgacccgctccccgcttcccattatcctgtgactctctgcggcgcaaaaaaatgtccggcgccagaagacgccagacatgttagtcgtaatatctcgcacgcctggcccttgccgggtggtgcgtccatcacaatgcacgcacggcttccatcaccagatagccggtcgcgccccagatagcgactgagaccagggaaacataaaccagtgcgcgaataccttttttagacataagccctccgaacgcaggggaaatagagttcaggctatcatcgccggtactacctctctatttactcaacggcagggcgacggtaacaacgttttcggtgagaaaatgtttcgcattgaaaataattacgagaggcgtaaagaagtgcgaattccggtgaagatctggtgggtaaaagtattatttttgggcattatgctgacaaaccaggaataatcccacggatgaattgctgcattattaaccgaattcagtacgttctgatacatgaattttgttgcgcaagacgccactttctgcggaaatagcacaagcagaacactggtattaaccgcttgaaatcaggaggttttaccagcgccagaccccaccgcgcgctgatgtggtatacggtttggcctgtttagaattattgtttactttcaaaaacttaaatctcctgctactgtcaatagacatcatagcctccccagagagtgatatgcgtagagacgttctgttattactgtgttcattttatctgttacctctgggcgcacatgccgatgatagcggactgagcgccaaagatattaagacgttgtttttcggtcacgatgaccgtaaagcggtgaaccgccccgaggagagtccgtgggacgcgattggccagttggaaaccgccagcggcaatctgtgtacggcgacgctcatctctccgcatctggcgctgaccgcgggccactgtctgttaacgcccccgcgcggcaagccggacaaagcggtcgccctgcgctttatttcccgcaagggcaactgggtctatgagatccacggcattgacgggcgagtcgatcctagcttaggcagacgcctgaaagccgatggcgacggctggattgtcccttccgctgcggcgccgtccgattttggtctgatcgtgctgcgctatgctccgtctggcattacgccgatcccgctctttccgggcagcaaggccgatctcaccgccgcgctgaaggcggcggaccgtaaagttacccagtctggctatcctgaagatcatctcgataatctttacagccaccaggattgcatcgtgacagggtgggcgcaaaccagcgtactgtcgcatcagtgcgacaccctgcctggcgacagcggctcgccgctgctgctgaaaacggaggacggctggcaggtgatcgccgtgcagagttcggcccccggcccgcaggatcgctggcgggcggacaatcgcgccattgcggtgactggctttcgcgataagctggaggcgcttgccggtgagtaatggaccgaggccgatgaagaatatcattattgacatcgtcctggcggaaatgattttccgccagccgaaagcagtgaacctgcgcagccctcagcgtcacctgacacaattacagcggggccaggcgtgaaggaagtttccgtttgccgcctggctttgcaggcggcgagacgtcaggcgagtttaattaacaccatgccggctaccagcaggataacccccgcccagcctttgttattcagacgctgaccaaacagcacccagccggcggcgatggtcgccgcgataccgaagccgccccacagcgcataggcgaccgagagatcgatccctttaaccgcctgcgacagggcgctgaacgcgcccaatactgccgccagggacaggatgccgtagatcttgcggcggaagccgtcggaaaacttcaaaaagacgttggcaataatttccagcacaatggcgattgccagccaggcggcatggatccactcaaactgctgcatgggccacctcctgcttggaagacgcttttttctgggtgcctgacttaattaagacgatccctatcaccagggtggtcaagccggctattttcagcagggacagactctcatcaaacagcagcacgctgaacagggtaatcagtaaaataccgatcccttcccacaacgcataggccacaccgagggcaatctttttaaccgcaaaggcaagaaaaatatatgacagggcaatcatggccagcattaaaataaagccggtgtgcccgccgctcacgcttgcccatttcatagacaaggtgccggtaatttcagcaataattgctaaagctaataaaatccaataaaacatgatcccttctcctgcttgagaatataatccattaccgtttacgcgagacgtaaacaggaaaatttctgacgtagatatcgctgtgcgcttggcgccagctcaggcagaaagaaggtgactatagcgccgaatgccagtgctgttcgccggcaaaacgggaaaaagtgagggatactgcggggtgatttaaaatatacatcctgaactgattgtccataaaattacaattatccgcggtgttgcttctcgtccggtgcggatgaaaattgtcctcagtagttaaacacaggtagatttgtagcatagtgctacatttaattcaaagactttgcaattctttacgccgcggtttttgttcaatgcgtttgttctgcaaaaaagcgtcattatgctaatgtaacgcaacctgttaataggcaaggaagtttgaggtcgggatcctatggctaaacccattattacacttaacggattaaagatggtcatcatgttgggcatgctggtgatcatccttaccggcattcgctttgcggcggacataattgtcccgtttatcctggcgctttttctggcggtgatcatcaatcctctggtccagctactggtccgctgccgggtgccgcgcgtgctggcgatctcgctactgattggcctgattgttatgttagccattgtgctgctggcctcgctggggacctcgctcaacgagctggcgcgcaccctgccgcagtatcgcaactatctctatgagccgatgcaaaccatcgcgccctggctgcagcgtatgggattcaccgtttcggtggtcgagctcaataagtacatcgaccctaacgccgtaatgaccctggtcaccagcctgctcactcagctgtcgaacgccatgtcctccatttttctgctgctgctgacggtggtgtttatgctgctggaggtgccgcagcttcccgctaagctgcagcagttaatgtccagaccagtagaaggcatgggcgccatccagagggccatcgacagcgtatcgcattatctggtgctgaaaactgcgataagcctgatcaccggcctggtggtctggggcatgctggtgctgctggatgtgcgcttcgcctttatgtgggggctactggccttcgcgcttaactatattcccaatatcggttccgtgctggcggcaattccgccgatcctgcaggtgctggtgttcggtggtctgtacgaggcgctggtagtgctggccggctacctgatcgtcaacctggtattcggcaatattctcgaacctcgtatcatggggcgcgggctgggcctctcgacgctggtggtattcctgtccttaatcttctggggatggttgctgggtccggttggcatgctgctctcggtgccgttgacgattatcgtcaaaattgccctcgagcagaccagcggcgggcagagtatcgctttcttattaagcgatgtcagtaaacagtagtccttccgcaggccggcgcttcgccggcctgctccctgccctacactctctccgtagaccactacgccttatgtattattgatccgcatcacaaacgttgcggcggaatcgttactctgatgctaacgatcggccaccgcgcttaattgatgctcctagcctcgcgtcgcacactaatctccaccaggacaaacaaaacgatttgtcgaatcaggaggttattaatgaatgccgaacaaacgacggggcgggtctggaaccgtcgccgaacggaaaaacagcggcggctggccgaggcgaacatgccaggtaaggtcatcccgactgaccagttggtcagcgtactggaaaacctgctcgcccccggcgaccgggttgtgctggaaggcaacaaccagaaacaggccgatttcctctcgcgcatgctggcggaagttaatccgcaaaaaatccacgacctgcatatgattatgcccagcgtcgggcgcagcgagcatcttgacctgtttgaaaaaggtattgcccgcaagctggatttctctttctccggcacccagagcctgcgcatttcgcaactgctggaagatggcctgctcgaaatcggcgccatccacacctatatcgaactctactcgcgcctgtacgtcgatctgtcgccaaacgtcgcgctgatcgccggctataaagcggaccgtaaaggcaacctgtataccggaccgagtactgaagatacgccagcgctggtggaagccgccgccttccacgacggcattgtgatagcccaggtcaacgaactggtggacgacgaatgcgatctgccgcgcgttgatattcccggctcgtggatcgattacgtggtggtcgccgacaaaccgttcttcattgaaccgctctttacccgcgacccgcgtctgattaagcaagaacatattttgatggcgatgatggcgattaaaggcatctacgcggaacatcaggttcagtcgcttaaccacggtatcggctttaataccgccgccattgaactgctgctgcccacctacggtgaacagctcggactgaaaggcaaaatctgtaaacactggacgctgaacccgcatccgaccttaatcccggccatcgaaagcggctgggtggagagcgtgcactgcttcggcggcgaactggggatggaagagtacatccgcgcccgcccggatatcttctttaccggcccggatggctcaatgcgttccaaccgcgccttctgccagctggcaggtcagtacgcggtagatatgtttatcggttcgaccctgcaggtcgatggtctggctaactcctcaaccgtcacccgcggtcgtctttccggtttcggcggcgcgccgaacatgggccatgacccgcacggtcgccgccacgccaccccggcctggctcaatatgatcaccgagccggacccgatgcaacgcggtaaaaagctggtggtgcagatggtcgaaaccttccaggccggcgtaaaaccgaccttcgttgaaacgctcgacgcggtcgacgtcgccaaaacctccggcatgccgctggcgccggtgatgatttatggcgatgacgtgacccacgtgctgaccgaagagggtatcgcctacctgtaccgggcggagagccttgaagagcgccgggccatggtcgccgcggtggccgggatcaccgatattggtctcggtgtggacgccaaacgcgtcgccgcgctgcgccagagcggcaaagtggtctacccggaagatatcggcattcgccgcagcgatgccacccgctcgctactggccgccggcagcgtcgccgagctggtggagtggtccgacggactgtacaacccaccggcaaaattccggagctggtaatgaaaaatctctcccccctacacgcagaaagccgcgtcagctggctggcgcataccgccagcgcgtgtctgattgacgaagcccgtctgagtccgaaaccgggtctggtcgatagtcgcggcaacggcgcgcatcaggatctcaatctggacctgatggaacgctccgcccgcagcctgcagccaacctttcacgcgctggcgcagcaaagctggcagcgtccagcggatatcgccctgcgcgaaaccgtcggccgcctcggtcgcgaaggtgaagcgcagatgatgatggcgacgggtggagttaacacccaccgcggcgctatctgggcgctgggcctgctggtcagcgcggtggcgatgttgggtggagagggtcaatcccaggcgatcgccgggaccgccgccgcccttgcccgcctgcctgacggtttcgcgccgaaaagctttagtaaggggctgcgcgccagccgccgttggcaggtgccgggcgcacgcgaggaagcgcagcgcggatttccgcatgttaccgccctggcgctgccgcaactgcagcagagccgggcgcgaggcgccagcgagcagcaggcgcgccttgatgcgctgatggccatcatgacctcgctgagcgatacctgcgtgctgtcgcgcgccggcatgaacggcctgcacgccatgcagcaaggcgcccgcgaggttctggcggcgggcggttgcgccagcgtcgccggtcgcgccgcgctggcgcgccttgatgcgcagatgctggcgcaaaacgcctcgccgggtggcgcggccgatctccttgccgccaccctgtttctcgaccgggtttccggctaacgcattcagaggatgttatggaacagattacattgtcatttcctgccaaccgcgccctcagcggcaaagcattggcaggagtcgtaggttcaggcgatatggaagtgctttataccgccgcacagggcgccacgctcaacgtacagatcaccacctcagtggataacagccaggcgcgctggcaggcgctgttcgacaggctgaacctgatcaacggtctgcccgccgggcagttgattatccacgacttcggcgccacgccgggcgtcgctcgtattcgtattgaacaagtatttgaggaggccgctcatgcgtaacgatcgcagctttatcgaactgcgcgctcgcgaacgcgcccacgccctgctggacgacggcagctaccgcgaactgctggatccgtttgaaggcattatgtcgccgtggctcggcgcgcagggcatcgtcccacagtccgacgacggtatggtggtcgccaaaggcacgatcaacggccaacctgcggtggtgattgccatcgaaggcaccttccagggcggcagtatgggcgaagtctccggcgccaaaatggccgccgcgctggagctggcggcggaagataaccgcaacggtatcccgacgcaggcggtgctgtgcctcgaaaccggcggcgtacgtctgcaggaggccaacctcggtctggccgccatcgccgatattcatgccgcgattgtcgacctgcgccgctacaccccggtggtcggcattattaccggtaccgtcggctgcttcggcggtatgtccatcgccgcggcgctgtgcagctaccttatcgtcacccgtgaagcccgtctcggcctcaacggcccgcaggttatcgagcaggaagccggcattgaagagtacgactcccgcaaccgtccgtttatctggagcatgaccggcggcgaaattcgcgccgccagcgggctggtcgacgcgctggttaacgatggcgttaacgccgttaaaaccgcaatgattgaggcgatcgccaaaggcgtaccggcacagcaccgcagcgacaactatgacgattatctgcgtcgcttgagccaattcgatacccgccagcaggcggataccgcgcagattaaacagctttttgcccgggaggataaataatgagtcagttcccaaaccgcgccgcgctatggctgaataaactggcacccgacgcgccgctgatgagtggtctgtgcccttcggtgcaggtcgcagatggccagattaatggcgaaagcgtccgctttatcgccgtggtgcctgacgctaacaaccactacccgcgcgccgccggcggcgaagtcggactgctggaaggctggacgctggcgaaagtggtcaacgaaaccatcgccgccgacgccgatcggcctgtcaaacggccgatcgtcgcggtaattgatgtcccgagccaggcctatggccgccgcgaagaagcctttggcatccaccaggccctggccggggcggcaggcgcctacgccaaagcccgtcttgccggccacccggtgattggcctgattgtcggaaaagcgatgtccggggcgtttctggcccacggctaccaggccaaccgcctgatcgcctttaacgatagcggcgtgctgatccacgcgatgggtaaagcgtcggcggcgcgcattacgctgcgtaccgtagaggcgctggagaaactggcggctaccattccgccaatggcctacgacgtcagcaactatgcgacgctcggcctgctctccgcccttctggatattaataatccggatgcccctgacgaccacgatctgtcgttggtcagcaacacgctgcgcgacgccatcgctgatgcgcgcaccgatgcctcactgaagtgccgcctgggcgcggaaaaccgccgcagctcgcagctggtccgcgatcgcatgcgcgccagctggtaagacgttcgtacgtaagtagtagaagaaaacctgccggaagcagtctcccggagcgcggaataaacgctccgggaagggacggcttttagaaaaaataacaatcgcgccagtactctattttatttacaggtgatttatgacttatgtgattattcatgctcttgccccgattttcgtcattatgctgctgggcttctgggccggtaaggccgggatggtagataacaaaaacgtctcgctgcttaatatttttgtaatggattttgccttacccgccacgctgtttagcgcgacggtacaaacgccgtgggccggtatcgtcgcccagtcgccgctggtgctggtgttgaccggcgcaatgtggatcacctatgccgcgatctacttcctcgccaccagcgtgttcaaacgcacgccgcaggatgccgcggtgctgaccctcaccgtcgccctgccaaactatgccgcgttgggtctgccgatcctcggcagcgtgctgggtgaaggcgcttctacctcgctgtcggtggcggtctctatcgcctgcggctcggtactgatgaccccgttctgcctgctgattctggagcgtgaaaaagcccgcgccgcgggtgaaaacagcggttctacgctggtgatgctgccggtgctgatgtggcgttcggtgaaaaaaccgatcgtctggggcccgctgcttggggtggtgctttccgcgatcggcattaaaatgccggacctgctgctggcgtcaatcaaaccgctgggcctggccgccaccgccgccgcgctgttcctcaccggggtgatcctgtcggcacgtaaactgcagctcaatgcgctgatcgctacatcaaccatcgtaaaactgctggtgcagccgtttattgcctggggtctggtgatgttacttggtctgcacggttctatcgccattaccgcgatcctgatgattgcgctggccgccggcttcttcggcgtggtcttcggcaaccgcttcggcgtgcagtctccggatgctgaagccgtgctgctgttaagctcggttctgtgtatcctgtcgctaccgctgtttatctctttgacttcaggactgtaaaccatgtcatcaacgccgcgtccccacgatttagtttggttaaaccacgccagcgccctggaagatattgccgagccgtgggtggttcagcagtggcgagccgcgctgccggtggtggtgaggcgcgacgttgacggccaggcccgcatcccggttggggtgcggggcatgaagcgcgaacagcgcgccgccggttgggtacaggcgcacaatatcgtgcgcagcgtcaccccggagatgcttgtcgagcgtgaagcattactctgctcgccgtttgtctcgcagccgccggttcaggcggctatcgccctcaccttacaccgctggccctggggctggggcgtcaccggcagtaccggctacgcgctggcaaccgaaatcccggtgctgcatgcggcaagcgatctggatttgctgatccgcgcgccgcagccgctggaccgcgaggcattgctggaatggcaggcccgggtggccctactaccgtgccgcgccgatacccagatagaaacaccatacggcgccttcgcccttaatgagtggctgcgcgatggccgcgcgctgctgaaaacatcccgcggcgcgcgcttaaccgcgacgccgtggcacagggaggactgatgaagattatatttacttttcccggtcagggcggccagcgccccgcaatgctggcggcaatccccgatcgcgaggctatcctcacccaggcgcgcgccgtgctgggggatgaagtcgataccctcgatagcgccgacgcgctaaagcatacccgtgcagtacaactctgtctgctgatcgccggggtagcctgggcgcgcgaactacagcgccagggcgtggatccgcagatggtcagcgggctctctatcggcgcgtttccggcagcggtgattgccggcgcgctcgatttcgccagcgcgctgaggctggtggcgctacgtggtgatttaatggagcaggcttaccccgaaggttacgggctgacggcgattatggggctgacccgcccgcgggttgaggcgctgatgcagggccacgaggtttatctcgccaacctgaacgccgaaacgcaaatcgtgatcgccgggcgcgatgaagccatggccgaggtggcgcagctggcgctgcaggctggcgccagtaaagcccaacggctggcggtcagcgtgccgtcgcactgcgcgctgttggctaaacctgccgcagccctggcaaaagcctttgccgacgtcaccttaacgcgccctcagcgcgcctatttaagcggctcgacggcgcgcgtgctgtgggatccgcagcggatcgccgacgatctggcgatgaacatggcgcgcaccgtgcattggcaggaggcgatgatcgccgctgatgaacgcgacgcgaggctggcaatcgagatgccgcccggcggcgtgctcacctgcctgacccgccaggcgggctggcgcggcgagacaatttcgctggagcgcagcggcgtagacgtcgcccgccatctggcgcagcggcttagcgattaatactgcgggcgtacatgcgcccttccgccgccaacgccagcaggtcggcatcgcgctcgcgatggtgtgaatagacgatagagatcagctggcgcatctgatagggttccgccagctttaacagctgcacatcgttttcgtaaaccttcttcatgcgccccggcagcagcgcaaacccgacgcctgcctgcaccaggcttatcatcgaaaagatatcattcaccctggtcacgatttccggctcaaaaccggctacatgaaaggcctcctgaaatccggcataagtcgcaaacccctccgccagcgagacaaatttacgatcggcgtaatcgcgcaggtcggcgagccgtgaggcatccagccgttcggtcgccggggcggcgagaaaaatatcgtcctcaaacagcggcaccacgtcgaaagcggtattattgaactccccttcgttggtggcgatcaggatggcatcgagggcatcgtcttccagcatatccagcagcatctgatttgaacccatcgtcaggtccagctccagctccgggcgacgcagcttcatccccataatgatgcgcggaacggtttccagggtcagagaatagagggtaccgatgcgcaaccgcccctgaccgacgcctgcaaccttgcgcgtcgcctcgagcccgcggttcatcagacttatcacatcctggcagtattcaagcagcgtccacgccgcctgcagcggcagcaggttgcgccctttatggacaaacagcgggcagcccaccccctcttccagggtatgcagcgcgcggtgaacgctgacgctgctgagtttcatcgcttcggcggttctggcgatattacctttcgccataaacatcataaagaccgacagcttgcggaaggtgatctcctggttaatatcctcttgcatggcccttccacactcctggtttaattttcttatttcaattcaaaccagtataacaataaccacgaaaactattttgattgcgaccactattgtcgaccgatgccaccagcaaccaaaaaaatcacgtatcaccttgtgaatttaatcagttgtccgccgatcatcggaccgcaatcggcgtaatcactttcacgatacgcagatatgggcaaaaaaacgcgcgctctcgcccgcaccagccttaacacggagcaggtgcccagtgcctgtaaaacacgacagccggtcgcttatcgggcccataccagctgtacgtacgcaaaaccatcagaaatccggtgataatgagatcggcttcgccgacaattgcgtggccaacatcggcattactggcaaggagatatcaatagatactaaggtgaagactatcaggccgctcaaaatcaagttaaagataatcttttaataaggttgaccttaattttcgtcccggacaggcggttatgtaaataacgaaaataatgaggttgagcctttcccggaaacgactgcttcagacattgtacagtaccatcaaaaacggggatgtgggttgggtatgaatgttgtatgatgccggcaaggatagccgcttaaacattgagggattaatgatggcagtttacaagcttagtacacgaataagatctaatgttccaacagattctttgctttatgacctgtgtatttatcgtatggactctcgcaggaataaatattccctgatagatgtgaagcaacagccattttctggaacttatgaaacacaaactcacatgacaggaaatgtagatgagtcactctcgacaatttatattatggaaatgaatctttaccgcaaaaccatgttgcatacggtctgtgtgacccccgttccattcactaaaatgtacacacttgaagcctttgcatcaggcaacgcctggtcttcggtaaagcgagagaacctctgttattttgagacaaaaggcacaatgaagcctgcaagcgagggtggggaaacaaaggagataagaattactattcctgaacgtccatttattgcgcgagagtatcccataggttcaccgcaagatccgtttaaaaaaaagaagatagaatcagaaattcaggacagattctataatctctcatatccttctcagtccggagcgagcgtgtgcggccctgctgcattcttttactgtctgcaacaagaccgtcctgatgtatatgcccaggccgccagggaactgtggcgatatggaaaaactaaaataggcgcactgacaatctcaccaggagagggatgtagacatccaacgggtatgttttttaccagtgatgggcagccaagaatattaggactagactggataacgcttgctggcctgagggattcagagaatgcagcgctgagcttcgatgctctcgattctccagtggcaggtatcaccatgtggcccacactagcggaatggtttgaaaaagcaggttatgaaatggtctttagtaatgtaggaatcactcaagctggtgtccaaggaatccgagatttaaataggtatgtagcgcaaggctttaaagtcgtcacattaataaatgacggactgctcgaaggcagtacaaataacacaacgttacctacacactgggttgtatgggatagttctgtaacacaagacgataatggatatgttaatttaaaattattttcttggggccgttcaacttactggataaaaaagggaaaagatgtgcgtttttttctcaacagattctttgggggaatggttttcaagccattgaagtgattatgaaaaaattgagcgttgtatgtattacctctttattgtcagcttgtgttttacatgctgacgttactccatatggtagctcacttgctgatgcagcagttgggaaagcttattccagtgaaataataataaagggaggcgccgtatcagctttagatgaaaacgggaaggaaagatttgtaggtgaaataaccccatccgacaccggattaactttgagttattgtaatgattctcctgcgcataattgtgtcagggtgcagggagtacccgtaaaacatgggatcgtcaccatacgaatatcaggcggactgtttggtacaaatgtagcgacaggcggagaatttgataaaacctatacgattaggattaagaattcagaagattcttcttaagatattttatgaggtgctgttgccatcatgcatcaaaataccttgcccccaggtaattaacaaaataaccaggaagttcaataattatcgaaatccaaactgatgccagtcgcaaagggaagaccatggtcttcccttttgttcactgtcgagtttgcttttacagcgccatatcgtgctgcggcgaggcctcgcgcggcgtctctgccggcttggcggtcgcggtaggcgcagccgctggcatctggatcaccggcggtttcgtcagctgcagggtcgcagcggtgtcatcccaaacctgctgggtcagcgccacgttaccgttcagcttctggccgtagctcggcacaatagcgtgaatgcggctctgccactccggcgagttaaactgctgcgggaacatctgcttgagcacgttcagggtgatcggcgcggcggtggaagcccccggcgaagcgccgagcagcgcggaaatggttttctgctgatcgaccaccacttcggtaccgagcttcagcacgccgcccttctctgcgtctttcttgatgatctggacgcgctggccggcctggatcagtttccagtcttctttacgcgcgtccgggtagtactctttcagcgcagcgaaacggtcatcatcgctgagcatcacctggctaaccaggtatttcaccagatcgaagttgtcgagaccgacgtgggtcatcggcagcacgttattggtggtggtagtgctgagcagatcgaagaacgaaccatttttcaggaacttggtcgagaaggtggcgaatggcccaaacagcaccacgcgcttaccgtcgaggtaacgtgcatcaaggtgcggcaccgacatcggcggcgcgccgactgaagcctggccatacactttctccagatgctgcgcggtgaccgccgggttctcggtcatcaggaacgagccccccaccgggaagccggcatagttatccgcttccggaataccggttttctgcagcagcttcaacgcgccgccgccggcaccgataaagacgtatttggcgtcaatagtctgcgcttccccgctctgcacattcttaatcgttacgtgccaggagttgtcggcattacgtttgaaatccgttacctcagaggaggtctgcagggtgaagtggttatttttcttcaggctgccgatcagctggcgagtgatttcgccgtagttgacatcggtacccaccggcgtccaggtggctgccactttctgctgcggatcgcggccttccatcaccagcggcgcccactgtttaatttgcgcgtgatcggtggagaatttcatcccctggaataaggtggtctgctgcagcgcgttataacgcttctgcagataatccacattatcaccccagacgaagctcatatgcggcgtggaattaataaacgagtgcggatcgtgcaaaataccgcgtttcacctgtgccgaccagaactgacgggaaatcataaactgctcgttaatatcgagcgctttgctgacgtcaatcgacccgtccgcccgctccggcgtatagttcagctccatattcgccgagtggccagtaccggcattattccagccgttggaagactccagcgccacgccgtccagtttctccaccatggtcagatcccagtccggctgcagcgcctgaagccaggtgccgagcgaggcgctcatgatcccgccgccaatcagcaggaagtcggtttttttcgaggtatccgcttcagcatgcgtcgccgcgctgacgaacatcgctaatgcggttaaggaaataatcgtttttttcattgcaggcataatagaattatcacgtagcacacggtcataagaggcagcatattaacgcacttttactttattttaaaatatcatttacactctcgcattttaaaccaaacagttatttaacttaaaaaatcaattttaaaaatagagcgaagacggataaaaaaataaggtcgaaaattcaatatctattgccgggtaaaataaaagttaagaatttctttaattacaaaagtccaggcgcgcatgctcatcgcgcgcctggcagagaagggattactgggcgggagtgacagcgctacgctgggcttcacgcagggcgagacgcagatgatcgtgatgtttggttagcagctcccgcgcgtgccaggcgtcaagcccgctgagcagcatcaggatcgcggtgcggcagtgctgatgacagctggccagggcggcctttgcttcactgcgcgtgcaatcggtggccgccatcacaatcgctatctgccgctccgcccagtgcgaattgtcagcctgcacgtccacccgcaaattgctgtacacccgaccgtcacggatggcgagtccggtcgtcagcatattgacgatctgcctctgggccaactgagccttcggattggctaaccccgccaccgcctccggcccggtctgcggagcaataatgatatccgccagctgcgccgcctcgctggtcggctgctgggtgatgaccgctatcggggcgcccagcgaccaggcgtggcgcatcgccccccacacccatggcgtcttgccgctgacggtcagcgccagcagcatatcgcggttgctgaagtccagcgactgcagctcaaaggcgcccaggtcataattattcgccgcagtctcccgctcggccatcgccgccgtctgcccaccggcaatcagccccaccagcgcgtgcttaccttccggcgaatagtcgctgaccgcctcaatggccgtccggcccgaagcgccggcgccaataatgaccaggcgccctccccggcttatcgtcgcggtggcgatatcaatcagccgggcgatatccggcagacaggcgccgaccgcctccgatatctgcttatcatcctgatgcagcatcgccagcatatcggcggtggcgaggcgatcgatgtgggtggtctccgggtgacgacgagcctgcattgacgcggttagcgaactgctcataacaacctccatttacgacagaaaaagcgcatctcggcaaaatcagcggcctgatgcatatccttatattcatcaggactatttaacctctgccgccactataagtggaatgttctgcgctttaccgccgtcggggtcacagtttaccgtccccaacgcgcgtttacgggtgattgtcggttatctgagcaattctgtctgaggtctcatcttcaccacccgcctgcatagccagccagaaggattgctggcaaaggttataaaactgtttgcgcatcgggttgatctcctggccggcggcgtcgataacctgccagtcaatccagcactccgggcaggatgtgctatcctgctgcgcgatctcgagctcatagcggcgctggatcaccaccccgctgcgatgccgccagcgggcgatctcccactctgcttccgcttcattatcctgttcacgatgctgcgccagacgttcaacgtgccgctgccggaggatatcccggaccagagaagccagttccatagtgtctcccttaagcctgtggcgaaaagccgcagtgtaccgcgcgctggaggagtctgccgtagcaaaagcggccttttgctttgattacacggctttatgtataccgcgctatcggcgataataatctttcactgaatctacccggggtcgtcatgaaggcttcagagcacccgcctcgcgttcgccaacgcgccttaccgttaaagctgagcaccgccgtgtccttgatgatcggcagcgtcatcggcgccgtgctgctgctggtgtatgccttgtggtatatgcagatcagcaacgccacccgcgacggtctgaaagagaccgcgctggcggtggcgcgcaccatggccgatatgccgcaggtgaagcgcggactggaggcgcccccgcagcagcagatcattcagccgctggcgcaggccattacccgccgcaacgacctgttgtacgctatcgtcaccgatatgcagggtattcgctattcgcatccggacagctcaatcatcggcaaaccgttcatcggccacgatattcagccgacgctgcaggggaaagagaatgtcgccatcaaccacggggtgctggccccggcgctacgggtgtttacgccggtgttcaacgaacggcatcagcaaatcggcgtggtggtggtcggcatttcactgagtaaagtggacgaacagatcgccaacagccgttgggacgtgctgctgaccatcctgttcagcgcgctggtctgcgcgctgggcacctggagcctggttcgcggcctgaagcgcgtgctgctggggctggagccgcacgaaatatccacccagtttcagcagcgtcaggccatgcttcacgccctcaaggagggggtggtagcggtcgatgcccatggcgaggtaaatctcatcaaccccgcggcggaagagatcctcttttccggcccggataagactctcgttcacagcccactgctcgacgatctgcagaccgtactgcagagcggcgagccaatgtacgaccgcgaactggggtgcaatggtctgctgctgatcggcaatacagtgcccattcgcagccagggtgcggtggtcggcgccatctgtaccttccgcgataaaactgaggtcagccaattgctgcagcgactggacggcatgatgagctatgtggatgccctgcgcaccacctcccatgagtttatgaataaactgcacgtgatcctcggtctgctgaatatgaaaagctacggcaaactcgaggaatacgtgctgcagaccgcccaccgctaccaggcggacatcggcgacattcagcaccgcattaaatccccggtagtggccggcttcctgataagtaaaattcagcgcgccacagagtgcggctttaccctgacgctggcggaggagagcctggtgccggattgtccgaacgagaaacaggtcacggtgctggtgacggtgctgggcaaccttattgagaacgcgctggacgccatgagcggccaggcggagggtgagatcggcctgctgctgcactaccaggacggctggctaagcggtgaagtgagcgacgatgggccggggatcccggagaacaacatcgacgctatctttaacaaaggcttctccaccaaaggcgagaatcgcggcgtcgggctgtttcttgctaaccagcagttgcgcgagctcggcggcaccctcgccgtcgaatcggaacccggcgtatttacccaattttttgttcatctcccctgggatagtaaaaggaaacctgcgtgataaatgttttaattgttgacgatgatgccatggtggccgaactgaatcgcctgtacgtggcaagggttcccggctttcgttgcagcgggagcgcttcgacgctcagtcaggcccaggagatgattaacgatccgcagcaggagatcgatctggtgctgctggatgtctacatgcagcaggacagcgggctcgatctcctgccgaccatccgcgagtcggggcgcgccatcgacgttatcatgattacctcggcggcggatgccgccacggtacagaccgcgatgcattacggggtggtcgattacctgatcaaacctttccagtttccgcgctttgaagaggcgctcaccacctggcgggagaagcgcaagctgataaccggccagccctattacgaacaggccgatgtcgaccgcctgctgcacggcggcgcgccggaggccagcgacgcgcgcaagctgcctaaagggttaaccgcgcaaacgctgcgcacactctgccagtggattgacgcccatccggatgtcgaattctctaccgatgagctggcggcggcggtgaatatctcccgcgtttcctgccgcaaatatctgatttggctggcgcagatcaatattctctataccactatccactacggcgctaccgggcggccggtctatcgctaccgtctggtcgccgaacagtacagtttgcttaagcagtacagtcaataacccgatagccgctgtccagcggcgcaaaacgcagccgctgcggcgatgagagaataatgtcgcgatttttggtaacgaaaatcgcgtcgatatcctgccgctgacgcagcgctgcgcagcccttctccacgccgaggccgaacagcagcgtggtccagatgtcgccgtctaaagaatccgcggaaatgaccgtcacgctgtcgagttcgttgtccagcggataaccgctgcgcgggtcgagaatatggtgccagcgtttgccatcctgttcgaaatagcgttcgtaggtcccggaggtgactaccgattgcccgttgaccgtcagggaaccgatcagcgcctgcgcgtcggcaaatggttttttcaggccaatggcccattcgccgagggtatgcacattgccgccgaggttgatcagcgccttctccacctgctgctgacggagataatcgcgcacgcggtcagcgatataacctttggcaatcgccccgagatccagctccatccccggctgttggagaaacacgctgtaggttgcctcatcgaggatcacctcctgtgggcgggtcagcgccagtcgggctctgatctcagccgcgtcaggcacgctgtgcccgtgaaaaccaattcgccacagcttcaccagcgggccgatggcgaggttaaaggcgctgtcgcgcaccatgctggcggctttggcgcactggatcagctgaaagaccggtcggctgacggtgaccggatgacgcccggcggcatggttgatatccatcacctgcgactcggcgcggttaacggtaagcaggtcttcgtagcgcttgataagctggaaaacgcgggaggccatcgcctcatcgtgggaacagagtttgagcaggatgggcgagcccatcaacacggcggagtagctatagacgcggttatcggacatcgggctctccttagaacgggcaagccgggcggcgaaagcgccaacccggcaggagcaaggttacaggttatcctctggcacgtttcgccgcctgatggcccgcgagggtaccgaagatgatgatatccgccaccgcgttaccgccgatacggttgccgccgtggatcccgcccaccacttcaccggcggcgtaggcgccgcgaatcggctgctgcgccacattcagcacttcgccatcggtattaatggtcacgccgcccatggtgtggtgcacgccgggggcgatgcgaatggcgtggaacgggccttcgttaatcggcgcgcgtagcgcggtggtccggccaaactgttcatcatgctgtttttccaccgccccgttatagcactcgagggtggcgaggaaggcatggtaatccatccccagtttctccgccagttcccgcggtgagctggcgctggtgacgaagcctttggcgatgtactcgtcggcagctttgtttttcgcccgcacatgctcgtcgaagacgatgtaagcatagtgttccggcagagcgataatcgccgccgagactttatcgcgggtctccatctcgttgaagaagcggttcccctgctggttaacgagaatagcgccgccgccgcgaatcgattcggaaatcagatacgaggtctgctgctcgacggtcgggtgaatctgaatttcgcccatgtccacggtgccggcgccgatgcgttccagcaacgcgataccgctcccggtagcccctttgtggttagtggtgacgaagccttcaaggtcaggacgatacttcacgaccatcgcgctgttagcgctgaagccgccggtggccactacgatgcttttggtctgtacttcaatgacctctttttcgtcgttgatcagacgtacaccgctaacctcatccccgcgcatcaggatctcttccaccgaggtatccagcaggacgtcaataccgcgtttggtgatgttgcgcaccaggccgctaatcagatagccgccgaccgctgacccgtcgcgcggacggtgggtacggtcaatgctcatcccaccggtggtggtaatgtcgttgagcataatgccccggtccgccagccactcaatggcttgtggcgcgttttcaacgaaacggcgcagcagctgcgggttgtttttgttgtggccgcccttcagggtttcctgatagaacaactccttactgtcttcgatacctttcacgcgctggaagcgggtttccgcggcgttcatcccggcggaagccttgatggtgttcccgccgatggttggcattttttcaacgatcagcacgctggccccttcgtcgtgtgcctgaatggctgccgccagaccggcgccgccgctgccgactaccaccacatcatagcttttcgacgcggcgtcattgccgccctcttccgccgccagcgctttactcgatttcagcatcgctttggcgaccgcttttttcaccgcctcgctctggctggtggccccggaaatggcatcgacgtgcggggtattggcggtgagaatacgttcgcggatctcttcgaagctggtggtgaattccacggtctggaccgggctcgccgccagttcgatatcggcaatatggtcattttcgaggctgacgttgatcaccagctcattggcgtcatcgtggacggtctcaacaaacatccccggtttaaatttggcgtcgcccatgctcatgtcgcggatcatcgcttccaccagcgagaaacgccatagcggttccggaatgtgcagcgcttcacgctgggtgctgtcgataaacagctccagctcttcgccggcggcgatacgtgacgcccagtccggataggcgatgcaggcgcggcccacggcgatcaggtcataaccatgatcgaggccctgctcggcatcggcggcgttgactaccccgccgacgcccatcaccggcacctgggcgagggtgtcagagcgcatcgcgcagtatttctcgataagcggcgtcggatcgctggtatcgacgatagacggacgcagggtggcccccaccgagaagtgcagataatcgacaccgcgggcggccagcttttccagcagatacatggtgtcgtcaaagcggatccccgggacctccatctcctccggcgagaagcgatagccgatgataaaggcatcgtcagcatactggcgggccattttgtgggtaatatccagcaccgccagtgggaaacgggcgcggttgtcgcggctaccgccccactcgtcatcgcgctggttggagttcggcgaatagaactgctgaatgagataggtgttggcgccgtgaatttcgaccccgtcgaaaccggcgaggatggcgcgacgaacgccgtcgccaaacttggcgatcatcccttccacttcttctccgctcagcgcccgcggcatggcggcgccctcacgcggcgcggcaatagcgctcggcgccaccggctggcgccccccgatcagctgcgggtcgaccatacggccgccgtggtagatctgcagaatcgcttttgaaccttcggctttgatcgcctcagcgattttcgccaggccggcaattttttcatcattatcgatgccgatcgctcccgggaaggccagaccgtagtcatcaataaagcagcactcgacaataatggtaccgatgcttccggcgcgcgcgcggtagtactccaccagctcgctggtgacggtaccatcgaaataaccggtgcaggtggtcattggcgccatgagcaaacggtttttcagctcggtaccatttggtaaagtaaatggctgcaaaatacgttcgttactggtcataagttacgctccagattttaaaatattaaaagctcagaatggggtgacggaatcattaatggttttggtttttttaattcctgttgtcatgccaataatatagcgacttttttaattaccaaaccaattacgttagttataaaactatttaaccccagcaataacatcgctacctccattgtattattaaaataataaatagcatttacataatacaaatgcgtgataacaattaggatacttttgttaacataaacaatgataataaaacaacaaaaaatacaataaaatcataaagatactaaaacataaaataatttcagcatttattgttcatttttcttttaacatctatcgatattttcgccaaaataacacctcatcatatagggttatactgataataaaaaaaatagtgaaatcaccggcttttcttgatcttgatcaattgcaacggccattgaaagcgcaatatataaataaccaacaaatttaatttaacgcctcataaaacgcgttaaataagcgccctgtcgatactcagaaacgcaaaataaaaactaaagtaacttttgtaattaaagaaaccactgagcaagacgctggcgtaaacgttattttcaacaacttgcagatactcattatgaaagagaaaaagacaaccataccgcctgccggtgcagtcaagccaacgactgcgaataaaaaacctctcctgatgatggcgctgccgattatcgttgccgtgctgttattgttcgtcccggtccccgaaggcctgccgccgtacgcctggcactacttcgctatctttgtcggggtgatcgtcgggttgatttttgaaccgctgcccggcgccgttatcggtatcaccggcgtggtagttattgccctgtgcagccagtggctgctgttcagcccggatcagatggccgcgccaggcttcaaaatggctggcgcctcctttaagtgggcggtgagcggcttcggcaactccaccgtgtggcttatcttcggcgcgttcatgttcgccgccggctacgataaaacgcagttcggccgccgcctggcgctgattctggtgaaatatcttggccgtcgcagcctgacgctcggctacgccatcaccttcgcggatctgctgctggcgccgtttacgccatctaacaccgcacgcagcggggggactatctacccgattatcgctaacctgccgccgctgtacggttcaaagccaaacgatccgagcgcacgtaaaatcggttcctatctgatgtgggtagcgatcaccgccgcctgtattaccagctcgatgttcctgtcggctctggccccgaacctgctggccctggcgctggtcaaaagcattgttggcatcaatatctcctggggcacctggttcattgccttcctgccgctgggtatcctgctgattctggccatgccgctgctggcctactggttctacccgccggaagtgaaagtcaataacgaagtgccactgtgggccgcgcgtgaactggaaaaactgggcaaactgtcgcgcaatgaaattctgctgctggtattcgtctgcttcgcgctgatgatgtggatcttcgccgccgactggatcgaaccggcgctggctgccctgctggttatcgtgctgatgctgtggaccggcgtgctctcctggagcgatatcaccaacaacaaagcggcatggaacacctttgtctggttcgccaccctggtggcactggccgacggcctctcctccaccggctttatcgcctggctgggtaaagagggcggcgcgctgatgagcggcatctccccggggatggcaaccatcgtcctgctgctggcgttctacctgctgcactatctgtttgccagcaccaccgcgcacaccaccgcgctgctgccggccatgctgaccattgcctcgactatcccgggaatgaatatggaagtgtttgtcctgctgatggtcacctcgctgggcgtgatggggatcatcaccccgtacggtactggcccaagcccaatctactacggcagcggctacctgccgaccaaagattactggcgcctcggcaccatctttggcgccatcttcctggccgccctgctgctgattggctatccgtggatgtccatgatgttctgattcataaccgccgggactaccccggcggtttttatctttatggagtaagtgactatgtcgactaaaccgtttgtttatcaggatccgtttccgctggcgcacgacgatacggaatactacctgctcagcaaagagcacgtctccgtcgccgaatttgacggccagcaggtcctgaaagtagagccgcaggcgctgaccttgctcgcacagcaggccttccacgacgccgcctttatgctgcgcgtctcccatcagcaacaggtcgcctcgattttgctcgacccggaagccagcgataacgataaatatgtcgccctgcagttcctgcgcaactcggaaattgccgccaagggcgtgctgcccacctgccaggataccggcaccgcgatcattatggggaaaaaaggccagcgcgtctggaccggcggcggcgatgaagccgctctggcgcagggcgtttacaacacctataccgaagataacctgcgctactcacagaacgcgccgctggatatgtataaagaggttaacaccggcaccaacctgccggcgcagatcgatctctatagcgtcgacggtgaagaatataagttcctgtgcatggcgaaaggcggcggttccgccaacaaaacctatctgtaccaggaaaccaaggccctgatcaccccggcgaagctgaaaaactacctcgttgagaagatgcgcactctaggcaccgccgcctgcccgccgtaccacatcgcgtttgtgatcggcggcacctcggcggaagcgacgctgaagaccgtgaaactggcctcgacccgctattacgacggtctgccgaccgaaggcaacgaacacggtcaggcgttccgcgacgtgcagctggagcaagagctgctgcaggaagcgcagaacctcggcctcggcgcgcagtttggcgggaaatacttcgcccacgatatccgggtgatccgtctgccgcgccacggcgcctcctgcccgatcggcatgggtgtctcctgctccgccgaccgcaatatcaaagccaaaattaaccgcgacggtatctggatcgagaagctggagagcaatccgggaaaatatattcctgaacatctgcgtcaggccggcgaaggcgaagtggtaagcatcaacctgaatcagccgatgagcgagatcctggcgcagctgtcggcacatccggtctccacccgcctgagccttaacggcaccattatcgtggcccgcgacatcgcccacgccaagctgaaggaacttatcgacaacggcgaggcgctgccgcagtacgtcaaagatcacccgatctactacgcgggcccggcaaaaacgccagccggttacgcttccggctccctcggcccaaccactgccggccgcatggactcttacgttgatctgctgcagtcccacggcgcgagcatggtgatgctggcgaaaggcaaccgcagccagcaggtgaccgatgcctgccataaacacggcggcttctaccttggaagcatcggcggcccggcggcagtgctcgcccagcagagtatcaagagcctcgagtgcgtggcctatccggaactggggatggaagctatctggaaaatcgaagtggaagattttccggcgtttatcctcgtcgatgataaaggcaacgacttcttccagcagatccagaataagcagtgcgcgggctgtaaacagcacggctaacgctatcctctgacgctgatatcaggccgtcgccgtttgggcgacggcttttttatgtccgcgtttccccagcttgaattcacttcgcaccaggctatgctcaactacaagccctccgttttttgctgaaaaataacaataattcttatctcaggtgcctcaatgaacaggatgagcatcgttatcctctgggcgctggcgctgctggtgctccagccggcgctggccgccgaaccgcgacagcagccaaccgcgcgcgagcaggcacgcacggtcacgattttccaccaacctgtcgtcatgttgcaggccacctttggccagaccacgcccgaagagcgcgttttgcgcacccgcagcgccctgcgcgccttcaccgaagatgatattcgccagccgctgcgggtcgtgccggttatccgctatggtcagccaggcagactgtttctgatgaacggcaaaccggtgctgctgctgagccaggcggatctcgacgagggcgatgatttaaccctcgaccaggcagcccagcgggtgctggcgcgtatggaagcccagcgcaccagcctccaggagcagttcaacaaccgctatctgttcatctccgccggtaaagccctggccggggcgctgctgctggcgctgttttactacggcgccttccgcgcctggcggcgggtgcgacgttttttcctgctgcggatcctcgaaaaacgtagcgccataccgcagcactggcggcgctatctcggcaatattgaagttcgactctatgctgtgctggtcatccttctcggcatgctggcctgttatctctggctgagctgggccttcagcctgtttccctggacgcgggtgtggagcgaatcgctgggcgactggtcgctgggggtgatccgccacctctctctgtcgattgtcgcctccctgccggggctgatgatcgtggtgcttattttccttctcacctggcttatcattcgcctggtgaaggtggttctcgaccaggtcgccgccggccgcattcagattcccggcattcatccggagaccgttagcgccacccgtcggcttatctcggtggtcatctggttgtttgccctctccgccgcctacccgttccttcccggcgccaactctctcgccttcaaaggcattagcgtgttcttcggcctgatgctcaccctcgggtcaaccggagtgatgacccatgcgatgagcggcctggtgctgatctactctcgggcgctgcgcaaaggcgactggatccgcctcgccgataatgagggtcaggtcagcgagattggcgtgctggcgaccaaaattctcacccgcgaaaattacatcgttaccgtcccgaacgcggtggtggtgagcgggaaaattattaatctcagcgccgaaagcgccgacggtggagtcaacctcaccaccagcgtcaccatcggctacgatacgccgtggcgtcaggtccatgcgctgctggagctggcggcgagacgcaccccggggatcgatcagcaaattgcgccggtggtgcgtaagctgggattgcttgactggtacacctcgtatgagctgcaggtgcgcttactccccacaaccaagctgccggatggccgcaacgcattgcatagcagcattattgatgtgtttaacgaattcggcgtgcagattatgtcgccgaactttgtgatgcagccaaaggcggcggtagtggtgccgcaggaagcctggtacgccgccccggccgtcgcgccgcagaagccggagaaataaaggttaacgtagcggcattttcgccgggtggcggctgcgccttacccggccaggggttcgtgcggcctgtcactcatttacccacttgcgcgactgaaactgccggtgctggcggcctcaaaatcgctgagacgttcccggaaggccggggcagcccgcatggatgcgggctgagggccgtgttttgcagggacgctgcctcggcccgacccgcagcctgcagggataagtcgaaggtaccacgcagcggcgattttgctggccggagcccgggggtacagggggcggcgactggccgccccctgtgcgctccctgcgccatacgaaacataacgcagaagatcaaccgggagcgcaatctgcccggaattaacatagaagttgtagccctgccaaacgttgcggtcctgccaaacatagtgcgaacagggacatttccggttgtgcctttatttcgccgggtggcggctgcgccttacccggcctacggggtctacaggcgatcttcgcttcccaggcccggcaagcgctgcgccggagggcaatctatcggcgccgtacccggcctacaacgactgccgggcaatcctactcggacgacgactcaaccctgcgcggcgtcgatgtcgtcaaacacctgctgcgccagatgcatcgtggcattggccgccggcagcccgcagtacagcgcagagtgcatgatcagctctttcagttcatcgcgggtcaccccgttgttaaacgacgcgcgtagatgcatcttcagctccgcctcgcgattgagagcgatcagcatggcaatagtgatcatgctgcgggtatggtgatcgagccccggacgcgtccaggtctcgccccaggcatagcgggtaataaagtcctgaaactcatcattcaacggcgtcagatgctgcagcgtacggtcgacgtgggcgtcgcccaatactttgcgccgtaccgccatcccgtcctgatagcgctgtttatcatccatggcgttccccctggaaaaagctcagcagcgccgaagtaaagcttttcggcgcctcaatgttagacagatgcgatgccgccagaaccaccacctcggaggcggggatctgctgctgcaggaaatgagcgtcaccgaccgtggtgacagggtcactttccccggcgatgattagcgtcggcagcgggatctgccccacttcgccccgcaggtcggcggcggccagcgcctcacagcaggcggcatagccttcagcatcggtatgggtcagctggtgacaaagcgcctcgatcacctccggcgccttctggcgaaacgcgtgggtaaaccagcggtctgccgctccggcggccaccaccgccatcccctcctgacgtacggcccgcgcccgcgacagccagctggcctgatcgccaatgcgcgccgcggtgttggcgaccgccagaccatgaaaacgctccggcgcaaagcgtcccagccacaggccggtcaaaccgcccatcgagatcccgcagaaccaggcgcggtcgatattcaggtgatcgagcagcgcaatcacatcctcacccaactgggcgagggtcactttgccatttttcgtcgttttaccgtggccgtgcgtgtcgtagcgcagcacccggaaatgggcggttaacgcctcgatctgcggctgccacatcgcccgggtggtgcccagcgaattggagaggacgataaccggcgcgccatccggcccgtcgagttgataatcaagattcatcacgttgctcctgataacgcgccagcacctggcgcacaaagcgttcggcgctgccggtcgccgttgccgggtccagcagcgtggttaagcgttcacgagagagatactgactgacctgtgggtcagccgcgagcagatcgaccagcgggcagtgacggtccagcgcctggcggcacagcgcctcgatatgatgatgcgcctcggctttgccaatgaattccgccagcgccagagtcaccgcctcagccataatcagcccatgggtgatatcgagatcggcgcgcattttctgcgggaaaacctgcatgtcgcgcaccagcgcctcgctttgcgccaacgccccgcccaccaggataattagctccggcagggtctcccactccgcctgccagccgcccagcgcccgctcatgctgctggagttggctggcgtagagcgtcgccatcagccccggcgtacgctgggcggcggtcaggatcgccgcgcaggccaccggattgcgcttatgcggcatcgtcgacgaaccgccgcgaccttccgccaccggctcgcccacctcagccacttcggtctgcatcagcagggaaaagtcgttagcgaatttccccagcgtgccgcagacgccggcaaaccaggcgcccgcctccagcagccgatcgcgctggctgtgccacggagtatccggcagcgacagaccgaggatctgcgccagcgccaggccaaccgccggccctttctcttttagcgcgtccagagtgcccgcggcgccgccgaactgcagcgccagcagccgcggacgcatctcgcgcagccgctgctgccagcgcaggagcgcgtcgagggtgcccgccagcttcaggccaaaggtcaccggcagcgcgtgctgcatccaggtccgtcccggcatcacggtatcgcgataacgatccgcctggagtgccagggccgccaacagctgctcaagcagagtctcagcggcatccagcgccccgcgcagctggagcaccagtccggtgtcgatggcgtcctggctggtagcgccccagtgaacgtagcgcgcagcctcgggatctcgcgcttttacctgggccgtcagctgtttcaccagcgggatggccagattaccggctcccactgccgcctcgcccagcgcggcaaaatcgatggcttcgtggcggcaggccgccacaattggcccgaccgcttccggcggcaccatcccgcaggcggcctgcgcttgcgccagcgccgcttcaaaatccagcatgccctgcacccgctgcgcgtcgctgaaccagtcggttagcggactgctgcgcagcatcggggtcaacaaactcattctggctccttaaacacgttcaataatcagggcgatcccctgtccgacgccgatgcacatggtgcacagggcgtaacgaccgccggtccgtttcagctgataagccgcggtcatcgccagccggccgccggaggcgccgagcgggtggcccagcgcaatcgccccgccgttagggttcacgtgggcggcatcgtccggtaagcccaaatcacgggtcaccgccagcgcctgcgcggcgaaggcttcattcagctcaatgacatccatctggcctaatgtcaggccggtctgcgccagcaccttgcgcaccgccggcgccgggccaaaccccatgatccgcggcgcaacgcccgccgtcgccacgccgaccacccgggccagcggctgaagatcgttagccgacagcgccgtctcgctggccagcaacagcgcgcaggcgccgtcgttaaccccggaggcgttaccggcggtaacgctgccgtcggcgcgcaccacgccgcgcagtttagccagcgcctccagcgaggtgctgcgcgggtgctcatcgcggctaaacagcagcggctcgcctttgcgctgcggcacctggacggcgatcagctcatcggcgaaacgccccgcctcttgcgccgcggcggtacgcaactgactgcgtaaggcgaacgcgtcctgatcggcacgggagatggcaaactcatcggcgacgttttccgccgtctccggcatggaatgcacgccgtacagggctttcatctgcgggttaataaagcgccagccgatggtggtatcctccatctgcatgctgcggctaaaggcgctctccgccttccccatcacaaacggcgcgcgggacatgctctccaccccgccggcgatcatcagctgcgtctccccgcttttaatcgcccgcgccgcgacgccgatcgcgtcaaggctggaaccgcacaggcggttgatggtgctcccgggcacgctctccggcaggccggccagcagcagcgccatccgcgccacgttgcggttgtcttccccggcctggttggcgcagccaaagatcacatcgtcaatgcgcgagggatccagtcccgggttccgcgccagcagcgctttcagcggcagcgccgccaggtcgtcagcgcgcatcgtcgccagggcaccgccgaaacggccaaagggtgtacgcaccgcatcacagataaatgcctgattcatcatagttccttacgcgctttccgccagttgttgaaaggtcagcgccaccggagtgatacgctgcagctcttcaaaagagaggccgttaaagatttcccgcaccaccgggccgcggtcggtgatgtcgatcaccgccaggtcggtatagatccggctgacgcagccgacgccggtcagcgggtagctgcactgcgccaccagcttgcactcgccgtcacgggtcaggtggtccatcatcacaaacacctggcgggcgccgatggccagatccatcgccccgccaacggccgggatcgcatccggcgcaccggtgctccagttggcgaggtcgccgctggcggaaacctgataggcccccagcacgcagatatcgagatgaccgccgcgcatcatggcgaaggagtcgccgtggtggaaatagcagccgccctgcaggagggtgacatactctttaccggcattgatcagctcgggatcttcttccccgggctgcggtttcggccccatccccagcaggccgttttcgctgtgcaggaacacctctttgtcagcgggcaggtaattggcgatgcgggtcggcaggccgatgccgaggttgacgtaagtgccttcgggaatatcgcgggccacgcgctgggccatttcgtcacgggtcagtttttgcatgtcgggctcctcaggcgcgttgtgcggcagtcaggttttccagcgagaagacgcgctggacgaaaatgccgggggtgatgatgttttccggatcgaggtcgcccagcgccaccagctgcgagacctctacgatggtggttttcgccgctgtcgccatgatcgggccaaagttgcgcgccgccttgcgatagaccaggttgccccagcggtcgccctggtgggctttaatcagcgcgaaatcggctttgatcgggtactccagcacgtagtggcgaccgtcgatttcccgtgtctccttaccttccgccagcggcgtgccgtagccggtgggggtaaacaccgcccccagcccggcgccagccgcctggatccgcgccgcgaggttgccctgcggcaccagctccagctccactttgccgcgacggtagagatcatcgaaaatctgcgaatccacctggcgcggaaaggagcagatcattttgcgcacccggcccgccttgagcagcgcggcgagacccacttccccgttgccggcgttgttatttatgatggtcaggtcgcgagcgccctggtcaatcagggcgtcaatcagaaaggtcggctggccggcggggccaaagccgccgatcataatagtcgccccatcgtggatcccggcgatggcctcgctcagcgtcgatacgcttttatcaatcatcaggtcgctccagtgatgtgcggtaatcgcactgttattcgttgttcgcacaaaatgtgacccgcttaacgatgtcggtcaagggcgataatcgaaatatggtgcgataatcgaacatcggttatctttagcgaaagaatgtgatcgatggcaaatatggggaacagaaatggacaagcatccagacgatttactgaccggcgacggcgatccgtttaaaggcgatcctaactttatggcctccctggcgcggggtctggaggtgattcaggcgttcacgccgcagcggcccctgctgtctatctcacagatcagtcagaagaccggcatcccgcgcgccgcggtgcgccgctgcctgtataccctgagcaagctggggttcgtgtatgccgaagacggtaagaatttccagctgcggccgcggatcctggcgctgggccacgcctggctggcctcgacgccgctggcgcgttcggcgcagccggtgctgcggcatctgagcgaaatgctcaatgagtcctgctccatcgccaccctcgacggcgacgatatcctgtatatcgcccgcgcctccagctcgcggattatgaccatcgacctggatatcggcagtcgccttccggcgtgggcgacctcgatgggccgggtgctgctgagccatcagccggaggagaagctcaacgatatgctggcccgggtgaccatgatccgctataccccacagacggtggattcggtggcgaagctgcgcgccgaactgaaacgggtgcatcagcaggggtatgccctcaacgatcaggagctggagatggggctgcgctccctcgcggtcccgctgtttaacgctcaggggcaggttcaggcggcgctcaacgtcggggtgcatgcgggccagatgacggcccgcgagatgatcgagcgcgtgctgccggagctgcaaaaagccgcccgcgagctgacgctgcttctgcgctaacgactgcgcttggcgtgctgctcccaggtctcctgcttcgcctgcgccgatttacgcagcgcaacatagcaggcgccgctgccgccatgatgcggaagcgcggcgcagaaggcctgcacctccggcagctcttccagccagcgcgccagatagctgcggataatattggcgtgggactggtcgtcgcggcctttgccgtgaacgatcagcacattgcgtaacccctctttctgcgcctgcaccataaaggcgaagagcatctgccggcactgttccaccggctggcgcagcagggagaggctcgcctgctggctgtatttcccccgccgcagcttatccagcacgccgctctgcagcccttctcgcttaaactccagcggcgtggcgagcggcacgatatcgagatagccggtggtgagaaaattatccagctgcagggtatcgacgcgttgcggggcccggctgttacgcccgggatgccagtgcacgtcattattacgtttcagaggctggacatcttccatggcgtcaagaaacagggatttgtcatcaaggttcatgggctctcctccagcggctgtcgccagctactatagccgcctcgcgctcccctctcaacgcgtttagccgcgttcgctggtaaagtgagcgcgacggacgattaaggaaacaattgtcggctctggcggcggaacagggtgattaacgacgccgtgagcggcgtttgccgggtatcgcgccgctggatcagataataggtggcggtgggtaacacttcacggatggggatcatcaccagtttgtcggccatcagcgggtcgttgcccagctccaccggcaggatgctgagaaaatcacttttcaccaccaggctgatgcaggatgagaacgtttcgcagacgatccccacctttggctcccgtcccagctgttcgaagcgctcctgcagctgcttgaagtagctgccgcgcggcgtcggcatggtccagtggtgatccatcaactcccccagcgaggtggcctgcgccgccggatggcccgcgcgggcgaacaccgcgaacggtttctcaaacagtttctcaaagctgaactcatggtcgtacggcccggggtaataggtattaatggtgaaatccagctccccctggcgcagctcattaatcatcgccagcagctgaccctccatgatccgcaccttcacctgcggatgctgctgatgaaagcggcagatcacagacggcatcagcgaccgggcgacgctggcgccaaggccaatattaatttgcccggcctgttccccctggcgctgcagcagttcatcctgcgccgcccgcagctcctcaaggatcaggctcgcatgttgataaaaactttcgccattgtcggttaacgccaccccctggctgcggcggacgaacagctgggcggaaagcccctcctccagctctttaatcgctttggtcagcgccggctgcgagaccgccagcgcccggctggcgccacggatactgccttcccgggctacttcgacgaaggcgcgaatttgatgaaatttaatctgaaatgccatgcttttagtgataaccgttgcttatcagacagaagaaaatgacatctactgtaatccatcaggctgtggcaggttaagggtgttaaggcctgtagcgcgtcagtgataaacaaaagctatcacatcgtgaacgccgtcacattttttacttatgacaggataagctatgccgcaacttgatgaatacctccgccagctggcgccctccatgacccaatggcgccgcgattttcacctgcacgctgaatccggctggctggagtttcgcaccgccagtaaggtcgcggatattcttgacgggctcggctatcagctggcgctaggccgcgacgtcatcgatgccgacagccggatggggctgccggacgaggagaccctggcccaggctttcgaacgcgcccgcgaacagggcgcgccggagcgctggctgccggcgtttgaaggcggtttcgccggcgtggtggccacgctcgacaccgggcggcccggaccaaccctggcctttcgcgtcgatatggatgccctcgatctcaacgaacagcatgacgatagccaccgcccccatcgcgatcatttcgcctcctgcaacgccggcatgatgcacgcctgcggccatgacggccataccgccatcgggctggggctggcgcatgtgctcaagcagtatgccgcccagctcaatggcgtcattaaactgattttccagcctgctgaagagggtacccgcggcgcccgcgcgatggtggccgccggcgtggttgatgacgtggattatttcacggcgatccatatcgggaccggcgtgccggcaggtaccgtcgtctgcggtggagacaactttatggccaccaccaaattcgacgtgcagttcagcggcgtggccgcccacgccggcggcaagcccgaggacgggcgcaacgcgctgctggccgccgcccaggccgcccttggcctgcacgccatcccgccgcacagcgccggcgcctcgcgggtcaacgtcggggtgatgcaggccggtaccgggcgcaacgtggtgccctcttccgcgctgttaaaagtggaaacccgcggcgaaagcgaagccattaatcagtacgtgttcgagcgggcgcagcacgtcgtcgccggggcggcggcgatgtacgaagcccgctacgaactgcgcatgatgggcgcggcgaccgccagcgcaccgtcgccggcgtgggtggactatctgcgcgaacaggccgcccgggtgcccggcgtgcaacaggcggtggatcgcatcgccgccccggcgggctccgaagacgccaccctgatgatggcccgggtccaggcgcgcggcggcctcgcctcgtacatgattttcggcactgaactcagcgccggtcaccacaacgaaaagtttgacttcgacgagagcgtgatggcggtagcggtcgaaaccctggcgcgcgtcgcgcttaactttccctggcagcggggggtgtaatggaagccatttttcagtttgtggacgaggtggttgaggcacaacgcgacacttactgcgccatcgccgacgacatctgggaccacccggagacccgctttgaggagttctggtcagcccaacggctggccgacgccctggaggcggaaggttttcagctcacccgcgatgctggcgggatcccgaatgcctttatcgccagcgtcggtgagggccaaccggtcattgccctgctcggcgaatttgacgccctggcgggactcagccagcaggcccacagcgcggaaccgacgcccttgacaccgggagccaacggccacggctgtgggcacaatctgctcggcaccgcggcattcgccgcggcggtcgccgccaaaggctggctgcagcagcacggcgacagcggcactctgcgcttctacggttgtcccggcgaggaaggcggttcgggaaaaacctttatggtgcgcgaagggttgtttgatgatgtcgatgcggcgctgacctggcatccggaagcctgggccgggatgttcagcacccgcaccctcgccaacattcaggcggcatggcgatttaccggcaccgcggcccacgccgctaattcgccgcacctgggccggagcgcgctggatgccgtcaccctgatgaccaccggcagcaatttcctcaatgaacatatcatcgagaaggcgcgcgtccattacgccattaccgataccggcggcgtctcgcccaacgtggtgcaggcgcaggcggaagtgctgtatttgatccgcgcgccggagatggccgacgctgagcaaatcttcgcccgcatagagaagattgcccagggggccgcgctgatgaccgagacccaggtcagctgccgctttgaaaaagcctgctccagctatctgcccaaccgcacgcttgaggcggcgatgtatcaggcggtctgtcattacggtacccccgcctggagcgacgaggaacgcgcttttgccgcggcgatccgcgccactctaagcgccaacgatattaacaacagcctgaacaatattgccggcaccagtggcgaggaaggcaaaacgttcgctcgtcgccaccgcgacaccttgctgattgatgaggtggcgccctgggtggccacggataacgtcctcgccggatccaccgacgtcggcgatgttagctggaaagcgccggtggcccagtgcttcagcccgtgcttcgcggtgggtaccccgctgcacagctggcagctggtgagccagggcagaacctccattgcccataaagggatgttgctggcggggaaagtgctcgcggcgaccgccatccgtttattcagcgacagcgccctgctggcggccagccagcaagagctcaggcaggtactggccgaacgcccctatcgttgcccgatcccggcggaggtgagtccgtccgttttacgataaccacttaagacaggctactcctggccaacgctgaccggcatcgcggcacgcaccgaccataataaccgccggcagtacgggagcaggcctgcccaacacaacaacgacaacagaggaatgcccatgagtatgtcatccataccgtcatcttcccccggcggaaagcgctatggctgggtagagaagatcggtaacaaggtcccgcacccgtttttgctgtttatctatctcatcgccgtgctgatcgctgccacggcaatcctctccgccctcaacgttggggtacaaaacccaactgacggttcgcgggtggtggtcaaaaacctgctcagcgtggaaggattgcactggtttttgccgaacgtgattaaaaacttcagcggtttcgcgccgctgggcgcgatcctcgccctggtgctgggcgccggctttgccgagcgggtgggcctgttaccggcgttgatggtcaagatggcctcgcacgtcagcgcccgctatgccagctatatggtgctgtttatcgcctttttcagccatatctcttccgatgcggcgctggtgattatgccgccgctgggggcgctgatgtttcttgccgtcggtcggcatcctgtcgctggtctgctggcggcgatagccggcgtgggctgcggctttaccgccaatctactgattgtcaccaccgacgtgctgctctccgggatcagcaccgaggcggcaaagtccatcgatgcctctttgcacgtcagcgtgatcgacaactggtactttatggcgacctcggtgatcgttctgacgctcgtcggcggactgatcaccgataagctggtcgagccgcggctgggccagtggcaaggcagtcgtgatgaaaagctgcagacgctgacgcccggggagcggttcggcctgcgcatcgccggcgtggcgacgctggtattcgtggcggtcatcgccctgatggtggtccccgaaaacggtattcttcgcgatccggttcagcatacggtcatgccctcgccgtttatcaaaggcatcgtgccgctaattatctttttcttctttgtcgtgtcgctggcatacggcatcgccaccggcaaaattcgccgccaggccgacctgccgcagttgatgattgagccgatgaaagagatggccgggtttatcgtgatggtcttcccgctggcgcagttcgtggcgatgttcaactggagcaacatgggcaagtttatggccgtcgggctgacggatctgctggagagttcaggcatgaacggtgttccggcgtttgtcggtcttgcgctgctgtcggcttttctgtgtatgtttatcgccagcggctcggccatctggtcgattctggcgccgatcttcgtgccaatgtttatgctgttgggctttcacccggcgtttgcgcagatcctgtttcgtatcgctgattcatcggtgctgccgctggcgccggtgtcaccgtttgtgccgttgtttctcggctttctacagcgctaccggccggatgcccgcctcggcacctactactcgctggtgctcccttacccgctgatttttctcgccgtctggctgctgttgctggtgggctggtatctggtgggactgccgatcggccctggcatctatccgcggctgtcttaacccaccgatgcgccagggacggccgccttagcttaacgcgatatcttcactttgaacttacgggtcgcttccccggctccggcgaatatgccgaaaagcgcgcgataccctcgctcaagcaacagcgacataccgtgaataaccagaccgctgaagatcagtacgattacgccagtcagtatatattgcatagctccacctctgagttattaaccgcgccgcgccgacgcggtagcactttcccgagcgcgcacagcggcgcggaggaccgacgtcgtcagcttaaaagtagcaaaaaccctgtccggtaacccgccaggatcgatccaaaaataaatcatcgtggcgatcgcagaatgcctccacggcggatagcccgccgtgctatctggcgatgcggttttaccttttgggagtatagttgactgccgtcagcgcgtggtatcgtgtgcctctcatgtacgatggtggatgacagaaacgatgttgaccttgctgcaggataaaatggataccccgctggggccgttgtgggtgctttgcgacgaacagtttaatttgcgcgccgtcgagtgggacgagcaccgcgatcggatggaaacgctgctcgacgtacactatcgccgggaaggctatcagcgcgtcgactgccgcaatcccggcggtctcagcagtaagctgagcgactattttgccggcgatttagccattatcgagactctgcctaccgccaccgccggcaccccttttcagcgccaggtctggcaggcgttacgcgaaatcccctgtggccaggtgatgcactacggccaactggccgaggcgctcggtcgtcccggcgccgcgcgcgcggtgggcgccgccaatggcgccaatccggtgagtatcgtggtgccctgccatcgggtcatcgggcgcaacggcaccatgaccggctatgccggcggcgtacagcgtaaagagtggcttttgcgtcatgagggctatctgttgctttgactgaaaatgccttttctggaattttcaggtaattttacaatcaaaagtggcgtaataatctgtttttaatcaaatagatacacaagcgatttgatttaccctgctgatattacgtgtttccgggcctgaagacttacctgctgatcaaaaagatgttaaaattgaccaatatcaattaaggcctgagcagacatatgatccctgagaagcgaattattcgacgcattcagtctggcggttgtgcaatccattgtcaggattgcagcattagccagctctgcatcccctttactctgaacgagcatgagcttgatcagctggataatattatcgagcggaaaaagcctatccagaaaggtcaaaccttgttcaaagccggtgatgagctgaagtcgttgtacgctattcgctccgggaccatcaaaagctataccatcaccgagcaaggtgatgagcagatcactggcttccatctggcgggcgacctggtgggctttgacgccatcggcaccggtctgcacccgagctttgcgcaggcgctggaaacctcaatggtctgcgagatccccttcgaaacccttgacgatctttccggaaaaatgcccaatctgcgtcagcagatgatgcgcctgatgagcggtgagattaaaggcgaccaggatatgatcctgttgctttccaaaaagaatgccgaagagcgcctggccgcgtttatctataacctttctcgtcgtttcgcccagcgcggcttctcaccacgtgagttccggctgaccatgacccgcggcgatattggcaactatctcggcctcaccgtcgaaaccatcagccgtctgctgggccgttttcagaaaagcggcatgctggtggtgaaaggcaaatatatcactattgaaaacagcgatctgctggcccagctggccggacaggcgcgcaacgtcgcttaatctctgcgcaatacctggtcacgatcggcaattttttcagatttgttgatctgaccaggctcctcccctgtttcaattcatccatataggttatctttttaataactgacggtagctgcagttgtaaggagaccctgtatggcgaagtatcagagcatgctggtagtaatcgatcctaaccaggacgaccagccggcgctaaggcgagcggtgtacctgcaccaacggattggtggacgcatcaaagcctttttgccgatctatgatttttcctatgaaatgaccaccctgctgtcgccggacgagcggacggcaatgcgccagggcgtcattgcccaacgaacggcctggatccgcgagcaggcgaaattctacctggaatcgggcgtgccgattgacgtgaaagtggtgtggcacaaccgccccttcgaagcgattattcaggaggtggtcagtgagaaacacgatctgctgctgaagatggcccaccagcacgacaaactggaggcggtgatctttaccccgacggactggcatctgctgcgtaaatgcccttgcccggtgtggatggtcaaagaccagccgtggccggaaggcggcaaagcgctggtcgccgtcaatctcgccagcgaagagaattatcacaacacccttaacgagaagctggttcgcgagacgctgtcgctggcggaagaagtcaaccacactgaagtgcacctgatcggtgcctacccggtgacgccgatcaatatcgcgatagaactgccggattttgatcccagcgtctacaacgacgcgatccgcggccagcatctgctggcgatgaaagcgctgcggcagaagtttggcatcgatgaaaaattcacccacgtcgaaaaaggactgcctgaagaggtgatcccggacctcgccgagcatctgcaggcggggatcgtggtgctgggaacggtcggacgtaccggcctgtcggcggcgttcctcggcaataccgcggaacaggttgtcgatcacctgcgctgtgacctgctggtgctgaaaccggaggcctaccagacgccggtggaactggacgacgacgacgacgattaaccgctaccactcatcttcccccgcctcgcgggggatttttttgcttgctgccagccaggcacaaaaaaagggccgctgacggcccctgtcgctgtccagcgagaatggcttagtggatacccagacgccaggccagatcgatctcttctttcagctccagcgaggagagcgccatcaggtcagcaaactccagctccagcagtttaagttttttcagatactgcgctggggtcatgacggtagtgtcgcggcgtaagaattcgatggccatctgcgttggggttaactcggtatccataatatcctctgtctgatgtaagaaccggaacattatatcacctcttgccgcttattttatgaacaattccaggcatctccctgcatataaaaaagccgtctcacaggagacggcttataaacaaacgttgtaaaacaattatgttacattacagcgctttcaggatcgcatcgacgctggctttagcatcgccaaacagcatatgagtgttctctttaaagaacagcgggttctgtacgccggcgtaaccggtgttcattgaacgcttaaagaccaccacattctgcgctttccacacctcgagcaccggcatgccggcgatcgggctcttcggatcgtcctgcgccgccgggttgacggtatcgttggcgccgatcaccagcacggtgtcggtgtcgctgaaatcgtcgttgatctcatccatctccagcacgatgtcgtaaggcactttggcttccgccagcaggacgttcatatgccccggcaggcgcccggccaccggatgaataccaaagcgtactttgataccccgcgcccgcagcttctcggtaatttctgctaccggatactgcgcctgagccaccgccataccgtagcccggggtgatgatcaccgagtgcgagtttttcagcatctccgccgtctcttcggcactaatctcgcgatgctcgcccacttcttcatcgccgccgctggaggaaccatcggtgccgaagcccccggcgatcacgctgataaaggagcggttcatcgccttacacataatgtaagagaggatggcgccggaagagcccaccagcgcgccggtgacgatcagcaggtcattactcagcataaagcccgccgccgctgccgcccagcccgagtaggagttgagcatcgagaccaccaccggcatgtccgcaccgccgatagaggccaccaggtgccagccaaaggccagcgcgatcgcggtcatcaccagcaggcacaggacctgggtgccggtgctgtcagagcgaacaaaaatcaccatcaggatgaaggaaaccaccagcgccgccaggttcagcttatggcgattgggcagcatcagcggcctggaggaaattttgccgcgcaatttaccaaacgccaccaccgaaccggtgaaggtcaccgcgccgatgaagatcccgaggaacacttcggtcaaatgaatattgaccagaatttgctccataccggtttcatgctgcaggtagctgttgaaacccaccagcaccgctgccagccccacgaagctgtgcaggatagccaccagctccggcatctcggtcatctcgaccttcttcgccagacgaataccgatcgccccgccgatcaccatcgcaagaataatccagccgacgttgccggcgtccggccccaggatggtagcaatcagggcaatggccatcccggcgatgccgaaatagttgccctgctgcgacgtttcgtgtttcgacaggcccgccaggctgaaaataaacaggattgcagcaacaatgtatgcagccgttactaatccaccagacatgtgctaccccttatcctttgcgaaacattttcagcatgcgctgagtcacggtaaaaccaccgaaaatattaatgctggcgatcagcaccgcgataaagctcaggaagctgacccagccgccgtggcctatctgcaacaacgcgccaaccacgataatgcccgaaatggcattggtcaccgacatcagcggcgtatgcagcgcatgggagacgttccacaccacgtagtaacccaccacacaggccagcgcgaagacggtgaaatggccgaggaactcttttggcgccacgttggccagccagccgaagagaataatcgccagcgccatcagcgcatatttgcgccacggcgacgccggtttcaccgcttctttcggtgcttccacttttttcgccgcggcctgcggctgagcggagacctgaatcggcggcgccggccaggtgatttcaccttcgcgaacaacggtcacgccgcgcactaccacgtcatcgaaatcgataacgatattgccgtctttctctttgcacagcagcttcagcaggttcaccaggttggtgccgtagagctgggaggactgggtcggcagacggccaggaagatcggtgtaaccgatgattttcacgccgttggcggtggtcaccacttcgcccggtacggtgtactcacagttgccgccgttttgcgaggccagatcgaccaccacgctgcccgatttcatggagtcgaccatttcgcgggtgatcagcttcggcgccggtttgcccgggattaacgccgtggtgacaatgatatcgacctctttcgcctgcgcggcgaacagcgccatttcagccttaataaaggcctcagacatcaccttggcgtagccatcgccgctgcccgcttcctctttaaagtccagctcgaggaactcggcgcccatactctgcacctgctccttcacttccggacgggtatcgaaggcgcgaacaatagcgcccaggctgttggcggcgccaatcgccgccagaccggctaccccggcgccaatgaccatcaccttggcgggcggaaccttgcctgccgccgtaatctgcccggtaaagaatcgaccaaattcatgcgccgcttcaacgatagcgcggtacccggcgatgttggccattgagctgagcgcatccagcgactgggcgcgggaaatacgcggcacggaatccatcgccattacgttgatattacgggccgccagtttttccatcagctgcgggttttgcgccggccagataaaactaatcagcgtggtccccggattcagcagggcaatttcatcgtcattcggagcattgaccttaaggatgacatcagactgccatacctcgtcgccggtcacgatttcagctcctgcctcggcaaaggcctcatcgtcaaagctggccagcttcccggcgccgctttctaccgcgacgctaaagccgagtttgagcaattgctcaacggtcttcggcgtggcggcggcccgggtctcctgggctagcctttcttgtggtacaccaatacgcatagttttcccttccatcggtttttgatgatggtttacttttctgcccaacaacgccaggacggcaaaatcttcctcgccatctttcgctgtctacaaaatgaaacagtaacaaactttttataacctactgaaaataccgattgtgatctactgcgataaaacacaaattttgattttattgcttattgtcagctcagatgggtccgggcagcaatatttacctgaatttgccgcccaggcctgataatccgcttatcctgcggtataaaacgccatttatcgccattgagatcattgtgttaacattacattaactaataaaagtggtattgattatcgtttttgctggtcaagcgcctgttttttcaacatatcgaaaaatgttatctttccgtagtatacgattcgggcggcaagcaaaaattgacgcagacagtcgcggcgattaaatgcaataatcaaacgttttcagtcaacaacaacaccagtatatggtttgcgcaaggcaaaggattatttttatgaagcttaaaaacaccctcctggcgtctgctctcctgacaaccgccacgttgtctgcccatgcagcgaccgagttgaccccggagcaggcggctgcgctgaagccctacgatcgcgttgtcgtcaccggccggtttaatgccattggcgatgcggtacaggcagtatcgcgcaaagccgacaaagacggcgcggcctcattctatgttgtcgacacgtcggactacggcaatggcggcaactggcgcgtcacggctgacctttataaagaagacgcgccgaaagcggatgcgccgaagaatcgcattatcaacggcgtgatggagttgccgaaagatcaggccgttgagctgatgccttacgacaccgtcaccgttcagggcttctatcgcagccagccggaagtcaacgacgccatcaccaaagcggcgaaagcaaaaggcgcctatgcgttctttatcgtccgccaggttgacgccaaccagggcggcaaccagcgcattaccgcttatatctacaaaaaagatgctgaaaaacgcgtgctgcagagcccggacgctatcccggctgactctgaagctggccgcgcagcgctggccaaaggcggcgaagcggcgaagaacgttgaaattccgggcgttgccaccaccgccgcggtgggttcgggtaccggcgttgggcgtttctttgagactcagtcttcgaaaggtggacgttacactgtcaccctgccgaacggcactaaggtcgaagaagtgaacaaagtgactgcggcgcaaatggtgccgttcgataacatccagttcaccggcaactacggcaacatgaccgagatctcctatcagacggcgaaacgcgcggcgaagaaaggggcgaagtactaccacatcacccgccagtggcaggaacgcggcggcaacatcaccatcagcgccgatttgtacaaataatcgctgctggctggctaaaaaggcggcgcattgccgccttttcattttttttcatcccccgccattgcatggcccccggacactccgtaaaatcccgcgccttagcgcaatcctccatttttatgcgatttcgcaaaataaatattctggaacagccattttcacctcgggaatgcaatggaaaagaaactgggcctgagcgccctgaccgccctggtccttagctcaatgctcggcgctggcgtattcagtttgccgcaaaatatggctgccgtggccagcccctccgctctgctcattggctgggccatcaccggcgtcgggatcctgtttctcgctttcgccatgctgctgttgacccgtattcgtcccgacctcgacggcgggatcttcacctacgctcgcgaaggattcggcgaactgatcggcttctgctccgcctggggatactggctgtgcgcggtgatcgccaacgtctcctatctggttatcgtcttttcggcgctcagttttttcaccgatacccctgagctgcgcctgtttggcgatggtaatacctggcagtctatcgttggcgcgtcggttctgctgtgggtcgtccactttctggtcctgcgcggtgtccagacggcagcggggattaacctggtggccaccctcgccaagcttctgccgctgggcgccttcgtcgcgctcgccgccctggcctttcagctggatacgttccgcctcgattttagcggcctggcgctgggcgtgccggtatgggagcaggtcaaaaacaccatgctgatcaccctgtgggtgtttatcggcgtggagggggcggtagtcgtgtccgcgcgggcgcgacacaagcgcgacgttggccgcgcgacgctgctggcggtgctgtcagccctcgcggtgtatctgctggtcaccctgctgtcgctgggcgttgtgccgcgcagcgaactggccgaaatgcgcaacccgtcgatggcgggactgatggtcaggctgatggggtcatggggggagatcgtcattgccgccgggctgatcgtgtcggtgtgcggcgcttatctcagctggaccatcatggccgcggaggtgcctttcctcgccgccactcataaagccttcccgcgcctgtttgcccgtcagaatagcaacaacgccccctccgcctcattgtggttgaccaatatcagcgttcaggtatcgctggtgctgatctggctgaccggatcggactacggcacgctgctgaccattgcctctgagatgattctcgtgccctatctgctggtcggcgcctttctgctgaaaatcgccactcgcccgctgcataaagcggtggctatcggcgcctgtatttatggcatatggttattatacgcgtcggggcctgtgcatttgctgttgtcggtggtactttacgctccgggtcttctggtctttttgtacgcccgacgtacgcaccagcacgatcgttcgctcaaacgccgcgaagtggcgctaattggtttattgctggttgccgctgtgccggcaacgtggatgctggtggggtaagcggtcgccctgccgcagaacgcataggagatacccatggctgaacaacagccccgcccgattctgatcacaggagcaggccgccgcatcggcctcgctctggcacaccattttctgcagcagcgccagccggtcatcgtcagctatcgtacgccctatccggcgattgacggcctgcgcgaagcgggcgcgctctgcctgcaggccgattttagcagcgatgacggcattctgaccttcgctgaagcggtcaaatcacacaccgacggtctgcgcgccatcatccataacgccagcgactggatggcggaaaagccgggcgtcccgctgagcaccgtcatcaaccgcatgatgcagatccacgtcaacgccccctatctgctcaaccatgcgctggaggcgttgctgcgcggccacggccatgccgccagcgacattatccatatcaccgattacgtggtggagcgcgggagcgacaaacatatcgcctatgccgccagcaaagccgccctggataacatgacccgctccttcgctcgcaagctggcgccagaggttaaggtcaacgccatcgcgccgtcgctaatcatgtttaatgagggtgacgacgaggcctatcgtcagcaggcgctggataaatcgctgatgaaaatcgcccctggcgaaaaagagattagcgatctcatcgattacctgtttaccagccgctacgttaccggccgctcattcgctgtcgacggcggccgcccgctgcgctagtggaaacggctccagccgaggattaacagccaggcgcacagcccccagcatcccaccgcgcctgccagcgccaacggcaggcgcatgatcccggtgaaataccacagtgacagcagatagataaaatagggaagaatcgaccacatgccgaaaacgatggtcgcgcgcagggcttcgatcccccgctcgctggcgacaatataatgggcgatgagcgcaaaggtgggaaacagcgggaccaggccagcgatagcgtagtttttggttttcgccagcacgccaatcagcaccaccaccagcgctcccagcagccctttgattaacagccccatgcccgtatgccttaacagtgaatcaataagttagggcagcatagcggatttaacgctgtttataaaagagtaatggcgggtaaaataagtgcggtgtatgttacttcttttactgatgtgcaatagacatgaataaaatcgtttttgttgaggatgaccctgaggtaggcacgctgatcgccgcctatctcggcaagcatgatatggatgtggtggtcgagcctcgcggcgaccgcgctgaggaggtgatcgcgcgggagaaaccggatctggtgctgctggacattatgctgcccggcaaggacggaatgacgctctgtcgcgatctgcgcgggcaatggcaagggccgattgtcctgctgacttcgctcgacagcgatatgaaccatatcctctccctggagatgggcgccagcgattatattctgaaaaccacgccgccagcggtacttctcgcgcgactgcgtctgcatttgcgccagcatattgctccggcaggcgccggatccgcctcctcaacgctcacgccacataaaaccatctccttcggctcgctgaccattgaccccgtcaaccgccaggtgctgcttggcggagaaaacgtcgccctgtcgaccgccgatttcgatctgctgtgggagttggccacccacgccgggcagattatggaccgcgacgcactgctgaaaaatttacgcggcgttacctatgacgggatggatcgcagcgtcgacgtggctatctcccgcctgcgcaaaaaactgctcgacaacgccacggagccctatcgtattaagaccgttcgcaacaaaggctacctgttcgcccctcacgcctgggataactaagcagcccttctgcggccctgcgaggggcccgctcatcgcgcgctcgccggcggcaaagttatcacgtttgctgcctgctgcgttcgtccctggcgcgcacattcatcaccggaacttgtcatattgattaaatcaatagaattagccgtacagaaccccatcacataactcctcaatatgattgtgctcaaggacttaccgctgtcagagtggcataaagcctgaaaacacaggacttttgcatgatgaaatacgttgtacttttggcactctcactgttcacttctctctctggctgggctttttccctcgacaacgccgatattcgactcctctgtccgcagcgcgggcaaatcgaggtgatccttcatcgctatgaacatacccagcaatcctgggggcagcatcactttgaaaccggcggcggccacgttcgccaggggccgctgctggtgatcccgtttgccaacctcgatcagatgatttaccaccagaccaccggcgagtttgcttactggtatgccgaaacggaaaaactggtgcgctgtcggctgctgagtctgacgaccacctatccggtagacattccttattatcgtgagtagcgtatccatcgacgcacaaaatacgattgccctgctcccaccgagggtgaagaaatcaccgcatcgagtgacactgtcaccttttcaccgttctgtctccaggctggctattgtcagggggcataaaccctgctttgatagcgtatcgatgatttccccgcgcctcgcccggggatatcgataacattgactccccgacgcgcagaagatgcccctggggcgccagacaggtttctcttgaatacgcggtaatgtaatgaaaaagctgttcgtgcagttctatcttctgctcttcgtctgctttctggtgatgaccatgctggtcggtctggtctataaatttaccgcggagcgcgccggacggcagtcgcttgacgatttgatgaaaagctcgctgtatctgatgcgcagcgagctgcgggagataccgccgcgcgactggagcaagacccttaaagagctggacctgaatttatcgtttgatctgcacatcgagccgatcagcaaatttaagctgtcggaaagctcgatgcagcacctgcgcgccggcgatatcgtcgccctcgacgatcagtacacctttattcagcgcattccccgcagccactatgtgctgtcggtgggcccggtgccctatctctattttctgcatgagatgcgcctgctggacgtggcgctaatggcgtttattgctatctctctggcctttccggtgtttatctggatgcgcccgcactggcaggacatgctgcgcattgagacggccgcccagcgctttggcgaaggtcacctcagcgagcgcattcacttcgacagtatgtccagcttcgagcggctcggggtggcctttaaccaaatggccgataacattaatgcgcttattgccagcaaaaagcagctgattgacggcatcgcccatgaactcaggacaccgctggtacgcctgcgctaccgtctggagatgagcgagaatctcaccgaggcggaatcgcaggcgctgaaccgcgatatcggtcagctggaggcgctgattgaagagctcctgacctacgcccgcctcgaccgcccgcagacggagctcagcctgacgactcccgattttcccgcctggatcagcgatcacgtcgaggatatccagatggttaacccacagcgcgaggtcgccctggcgacgctgacccacggtaactacggcgcgctggatatgcgactgatggagcgggtgctggataatttggtcaataacgccctgcgctacagcagccagcgggtggcggtcagcctgacgctgcagggttcgcgcgcttcgttgctggttgaggatgacggcccgggaatcgcccccgaggagcgcgagcgggtgtttgagccctttgtccgccttgaccccagccgggaccgggcgacaggaggctgcggcctcggcctggcgattgtccacagtatcgcccaggcgatgggcggcgaggtgcgctgcgaggccagccctctcggcggcgcccgcttctgctttagctggccggtctatcatcagctgcctgatttcacctctgcctgaataaaacttgcgcagaagccgcgggctgggtatgctgcaaaaatctaatagtatgttgtaactaaggtggtaataatggccagctacgacctcgttgaacgtctgaataacacctttcgccagatcgagctggagctgcaggcgctccagcaggcgttaagtgactgccgtctgctggcgggccgggtatttgaactgccggcgatcggtaaggatgccgagcacgatccgctggccactattccggtggtgcagcacatcggcaagacggccctggcgcacgccctgcgccactacagccatctgtttatccagcagcaatcggaaaaccgcagcagcaaggccgccgtacgcctgccgggcgctatctgcctgcaggttaccgccgcggagcagcaggatctgctggcgcgtattcagcatatcaatgccctgaaggccaccttcgagaagatcgtcaccgtcgactccggcctgccccccaccgcccgttttgagtgggtacaccgtcatttgccggggttgatcacccttagcgcctaccgcacgctgacgcccctcgtcgacccgagcaccatccgcttcggctgggccaataagcacgtcatcaagaatctgacccgcgaccaggtgttgatgatgctggagaaaagcctgcaagcgccgcgggcggtgccgccgtggaccagggagcagtggcagagcaaactggaaagggagtatcaggatatcgccgccctgccgcagcgggcgcggctgaaaataaaacgaccggtgaaagtccagccgatcgcccgcgtctggtacgccggcgagcagaaacaggtacagtacgcctgccccagcccgctgatcgccctgatgtccggcagccggggggtcagcgtaccggatattggcgagctgctgaactatgatgccgacaatgtgcagtatcgctacaaaccggaggcgcagtcgctgagattgcttatcccgcgcctgcacctctggctggctagcgaatagccaggctgccgaccatctcttccgggcgcacccagctgtcgaattcggcttccgtcaggtagcccagcgccagcgccgaggctttgagagtcagcccctcatggtgcgcttttttagcgatttccgccgccttgtcgtagccgatatgggtattcagcgcagtaaccagcattagcgactcattgagcaactgactgatccgctcgcgattcggttcaatacccaccgcacagtgctcgttaaagctcgccataccgtccgccagcagacgcaccgactgcaggaagttgtggatgaccatcgggcgatagacgttaagctcaaagttgccggaagcacccccgatattcaccgccacgtcgttgcccatcacctggcagcagaccatggtcagagcttcgcactgggttgggttaaccttgcccggcataatcgatgaccctggctcgttttccgggatggcgatttcaccaatgccgcagcgggggccggaggccagccagcggacatcgttagcgattttcatcagcgaggccgccaggcctttcagcgcgccgtgggcatggaccagggcatccacagtggccagcgcttcgaatttgttcggcgcggtgacaaatggctgtccgctgagcgacgccagctcggccgccacccgtacggcatattccggatgggtattcagcccggttcctaccgccgtcccacccagcgccagctcggcaagatgcggctgactggcttcaatgtgcttcaggctatggtccagcatcgccacccagccggagatctcctggcctaaggtgagcggcgtggcgtcctgcagatgggtgcggccgatcttgacgatatccctgaaggccaccgctttttcattgagcgtcgcccgcagcgcctgcagcgacgggatcactttttcccgcagggcaatcagcgccgcgacgtgcatggcggtggggaatacatcatttgagctctggctcttattcacatcgtcattgggatgaatttttcgcgccatcccccgttctccgccgagcagttcactggcgcggttggccagcacctcgttcatattcatattgctttgggtgccggagccggtctgccagatagccagggggaactcctgcgcgtgctttccggccagcacttcgtcagcggcggcgacgatcgccccggctttttccgccgtcaacagtccgagatcctggttaaccttcgccgccgcccgcttggtcagcgccagggcgtatatcagctccccgggcattttttcggtcgagatgcggaaatgctccagcgagcgctgggtctgggcgccccagagtttatcggccgggacctcgatggcgcccatcgagtctttttcactgcgatgcgttgtcattactttctccttggatgaaaagtgcgtcatagcgacaaagctcacctgcttaaaagactaagtattggccagattgataagttgttttggtggttcgtgccgcgaagcgacataaaaaaagccgccccgaggggcggcccagaccgctgacaaaatgcaatcgtcgggattgcccggcggcgctacgcttgcgcgggcctacagagaactgcataacttattgatattgctgtttttcgtaggccgggtaaggcgaaagccgccacccggcagaaaggcgctcaccctaacgaaatcaggtttgtcatcgaccagcgccgccccgaagggcggcctgggttacttcacgcagcgggcgcactgcgaggtctggatctgctggaagaagtcattgcctttatcatcaacgaggataaaggccgggaaatcctccacttcaattttccagatagcctccatacccagctccggataggccacgcactcgaggctcttgatgctctgctgggccagcactgccgccgggccgccgatgctgccgaggtagaagccgccgtgtttgtggcaggcgtcggtgacctgctggctgcggttgcctttcgccagcatgatcttgctcgccccatgggactgcagcagatcaacgtaagagtccatgcggcctgcggtggtcggccccaaagagccggaggcgtaaccgtccggcgtcttggccggacctgcgtagtagatcgggtgatctttgacgtactgcggcagcgcctcgccgttgtcgataagctccttcagcttagcgtgggcgatatcgcgggcgacgatgatagtcccgctcagcgacaggcgggtggacaccggatactgcgacagctgcgccaggatctcgctcatcggctggttaagatttaccttcaccgcttcgccttccccggcctggcgcagatgctcagggatatatttccccgggttgctctccagcttctcgatccagatgccgtcgcggttaattttggctttgatgttgcggtcggcggaacaggaaacccccatccctaccgggcaggaagcgccgtgacgcggcagacggatcacgcggatatcgtgggcaaagtatttcccgccgaactgcgcgccgagaccaaggttctgcgcctccagcagcagctcctgctccagctgcacgtcgcggaacgcctggccgtgctcgttaccttcggtcggcaggccatcgtagtatttggtggacgccagcttcacggtcttcagcgtcgcttccgccgaggtaccgccaatcacgaaggcgatatggtacggtggacaggcggcagtaccgagggtgcgcatcttctcgacgaggtaatttttcagcttcgccggggtgatcagcgctttggtttcctggtacaggtaggttttgttcgccgagccgccgcccttggcgatgcagaggaatttgtactcatcgccatcggtagcatagagatcgatctgcgccggcaggttggtgccagtgttaacctctttatacatatccagcggcgcgttctgcgagtagcgcaggttgtcctggatataggtgttgtacaccccctgcgccagggcggcttcatcgccgccgccggtccacacgcgctggccttttttacccatgatgatcgcggtgccggtgtcctggcaggtgggcagaatacctttggcggcgatatccgagttgcgcaggaactgcagcgcgacgtatttatcgttttcgctggcttccggatcgttaaggatatccgccacctgctgctgatgcgcagggcgaagcataaaggaggcgtcgtggaaagcatgctgcgccagaagggtcagcgcctgagggtcaacttttagcacttcctggccggcgaattcggcgacggagacgtaatcactgctgaggagataatactcggtgtcatcctttttgagcggaaaaggatcctggtaaacaaacggtttattcgacattgtactctcacttactgctttggctgattatgtttcaggcagggactccatgtgcctgtagaaaagcgagtcgaacaatcttacacaattttttaacaaaaactgagacaaggacgactttttctttcagcagttgcttctccaccgtttgctggtttaatagggcgataaaatttactttgtttgaaacagggattgagaatgcaaaagctgattaacgccgtgcagaactatgcatggggaagccacaccgccttaactgaactgtatggcatcgccaacccggacaatctgccgatggcagagctgtggatgggggcgcatccgaagagcagctcgcagatcctggcggccgacggccagccgcgttcactgcgcgaggtgattgacgcggataaagccgctctgctcggcgacaaggttgccgcccgctttggtgaactgccgttcctgtttaaggtactgtgcgccgctcagccgctctcaattcaggtgcatcccaacaagcaggcctcggaagaaggtttcgcccgcgagaacgccgccggtatcccgctctccgccgccgagcgtaactacaaagatccgaaccacaaaccggagctggtttttgccctgacgccgttcctggcgatgaatgcatttcgcgagttcagcgatattgtcaccctgctgcagccggtggctagcgcgcatccggcaatcggcgccttcctgcagcagccggacgcgactcacctgagccagctgtttgccagcctgctaaatatgcagggtgaggaaaaggccaaggcgctgcaggtgctgcgcgacgtactggcccgtgaacaaggcgaaccgtggcagacaatccgcctgatcgcggaattctatccggacgacagcggcctcttctccccgctgctgctgaacgtagtgaagctgaacccaggcgaagcgatgttcctgtttgctgaaacgccgcacgcctatctgcagggggtggcgctggaggtgatggccaactcggataacgtactgcgcgccggcctgacgccgaaatacattgatattcctgagctggttgctaacgtcaagttcgaggctaaaccggcgggtgagctgttgacccagccgcagcgtcacggcgcggaactcgacttcccgatcccggtggaagattttgccttctccctgcatgacctctccgccgagggcagcgatctggcccaggcaagcgcagcgatcgtgttctgcgtcgacggcgaagccgtactgcgcaaaggcgaccagagcctgaccctcaagccgggcgagtcggccttcgtggccgccagtgaatcgccggtgcaggtcagcggccgcggccgcgtggcgcgcgttttcaataagctccagtaagcgactgacccttcaggtcgcgcttactgttggtgataactcagccaggcggtctctccgcctggcttcatttatggataaatgctatgaaaaaatcgctggtcgcagcaggagtcatcgtggcgctgggcgtggtatggacaggcggcgcctggttcactggtaaacagctggaaggccggatcgccgatatggtgcagcaggcaaacgcccagctgcgcagcagcgcgccggagtcaggtctggagctgagctatcaggactaccagcgcgggctgttcagcagccatctgcagctggtggtgaagccgatcgccggtcaggctaacggctggctggccgccgggcagagcgtggtgcttgacgaagtggtcgatcatggccccttcccgctggcctcgttaaaagcctttaatctggcgccggcaatggcttccgtccacaccacgctggtgaaaaacgacgccagccaggcgctgttcgagatagccaaaggcgacaccccctttaccgtcgatacgcgcattgcctacagcggcgacagccagtcggctatcgtccttaacgccctcgactacgctaaaggcgatgagaaagtcaccttcagcggcggtcagttccagctcgacgccgaccgcgacggcaaaaacatcagcctgaagggccaggccggcagcgggcagatcgatgcgctcaacgaatataatcagaaggtacagctgcgcttcgtcaacctgaccaccgacggcgccaccgagctggccagcttcaacgaacgtatcggccagcaaaaaatgaccctcgataaactggccatcagcgtcgaaggcaaagagctggcgctgatcgacggcatggcgctggacggcggctcgacgctgacccaggacggcaaaggcgtgaacagccaggtgaactacaccgtcaacagcctcaagctgcaggggcaggatatgggcagcggcaaactcacgctgaaagtggataacgtcgacggtcaggcgtggcaccagttcagtcagcagtacagcgcgcagtctcaggcgctgctggcgaaaccggagctggcgcagaatccggagctgtatcagcaggccctcaccgaaacgctgttcaatgcgctgccgatcctgctcaaaggcaacccgtcggtgaccatctctccgctgagctggcgcaatgccaaaggcgaaagcaccctcaacctctcggttctactgaaggatccggcccaggtgaccgctccgccgcagaccctggcggacagcctggatcgcgtggtgcagtccctggacggcaaagtggtgatcccggtggatatggcgacggagtttatgactaagatcgccggtctggaaggctatcagccggccgatgccgccaaactcgccgatcagcaggtcaaaggcctggcggcgatgggccagatgttccgcattaccaccatggaagataacgccatcagcagcagtctgcagtacgcgaacggccaggtgacgctgaacggacagaaaatgccgctgcaagactttgccgcgatgtttggtctggaagcgccttcgctgccggacagcgcgccgcaggaaggccagccgcagcaggatgacgccgctcctcagcaggacgacgccgccccgcagccgtaacttatcggtacaggagacggccagcgcgcgccgtctccctcattttcgcgtcaccagccgcgggggcataatctggtttcgcgtctcgccagtcccctcttccagccgccgcagcatcgaatccgccaggcttttccccatctcccgcgccggggtggtcacccaggtgaggggcaggtcgtcgagggcggcctccggcacgtcggcaaacgccgccagcgccacccgctgctcaaagtagctctcgacgccatcttccccgctctgtcttccagcccgtaacaaaccgaaccacgcgccggtggctaccacgttgttgtagcacagcaccgcggtaatggtcggattctggcgcagcaggccggtcatcgcctccgccgcctgcttctgactggactcgcactccagcacccattcgctgtgaaacggcaggccgtatttcagcaaggtggcgcaatagccgccgacccgctcggcgcgcgtcagcgaagcactctgcccgccgagccaggcgatccgctgatggccgcggcggataagatgctccgtcaccagctgcgccgcctgcatgttgtccgggcggatcaggtcgacatcgtcaagatagctggcgcgggaagcaaacaccagcggcacccccgcctccgccgcacgctcgcgcagctcgctcccgcggtcgatcgccccggcgataatcaccccgtccaccccctgcgccgccagcgtatcaaaccgctgggccatcttctcgccgctgcggcctccctgggtgagaaataccattttcccctgcctctccagggcatcggtgaggccggcggttaattcagcataaaacggttttgacaggtcgctgacgataaggccaatcaccccgctctgcccaccgcgcagcgaggccgcctgacggttgcgcacaaatcccagctgttcgatagcctgattaacccgctcgccggtggcgctggagatgcgccctttgccgctcagtaccagtgaaacggtactcacggagacgccggcagccagcgccacatcattgatggtgatcttttttgcgattgccataacctgctggctgactcccttgcctgtcgataaatcgttttatcattgtgcgatctttataaaccttattatcgcttgaatatgtgatttttatcgcactaaaaagtggtaaaacgttttatcttgccgtggcgttagttctcccgaccacttatgaatcaggaaccgtgctatgacggcgaaaacagcaccaaaaatcaccttatgggaatttttccagcagctgggaaaaaccttcatgctgcccgtagcgttgctctcgttttgcgggatcatgctggggatcggcagctcgctaagcagtcacgatgttttgactctgctgccgtggctggatatgccgctgctgcaggccatctttatctggatgagcaaggtcggctcctttgccttcagcttcctgccggtcatgttttgtatcgccatcccgctgggtctggcgcgagagaacaaaggcgtcgccgccttcgccggcttcgttggctacgcggtcatgaacctggcggtcaacttctggctgaccgcgaagggtattctgcccaccaccgacgccgcgatcctgaaggccaacaatatccagaacattatcggcattccgtcaatcgataccgggatcctcggggcggtgatcgccggaattatcgtctggctgctgcatgaacgcttccataacattcgcctgccggacgccctggccttcttcggcggcacccgcttcgtgccgatcgtcaccaccgtggtgctggggctggttgggctggcgatcccgctggtgtggccagtcttcgctatggggatcaacgccctcgggaagatgatcaacagcgccggggattttgggccgatgatctttggcaccggcgagcgactgctgctgccgtttggcctgcaccatattctggtggcgctgatccgctttaccgaagccggcggcaccctcgacgtctgcggccacagcgtcagcggcgcgctgaccatcttccaggcgcagctgagctgtccgacgacccacggcttcgccgaaagcgccacccgtttcctgtcgcagggtaaaatgccggcattcctcggcggcctgccgggagccgcgctggcgatgtaccactgcgcccgtccggaaaaccgacataaaattaaaggcctgctgatctccggggtcatcgcctgcgtggtcggcggcaccaccgagccgctggagttcttgttcttgtttgtcgcgccggtcctgtatgtcatccacgcgctgctgaccggtctcggctttaccatcatggcggtgctcggggtaaccatcggcaacaccgacggcaatatcatcgacttcgtggtgtttggcattctgcatggcctggcgaccaagtggtatctggtgccggtggtggcggctatctggttcgcggtctactatgccatcttccgcttcgccatcacccgcttcaatctgaaaacgccgggccgcgacatcgacactgccgccagcgtggagaaagccgtcgccggtaccatcggcaaatccgggtataacgtaccggcgattctggcggcgctcggcggcgcagagaacattgtttcgctggataactgcattacccgtctgcgcctgtcggtgcacgatatgagcaaagtggacgccgccgcgctgaaagcccatcgcgccatcggggtggtacagctcaaccagcataatctgcaggtggttattggcccgcaggtacagtcggtaaaagatgagatggccacgctgatgaataccgtgcaggcctgatcccactagtccccctccgctacggagggggcgctcgctaaggaagctccaatgtttgattttgccacccctatcgatcgccacggcacctggtgcacgcaatgggactatgtcgccgaccggtttggcgccgccgatctgctgccgttcactatttccgatatggatttcgccaccgcgccctgtattctcgacgccgtcagccagcggctggcccacggggtgttcggctacagccgctggcgcaacgaggcgtttctcggggcgattgtccactggtacgccagccgctttaacagcgacatcgatccgcaatctgtggtctacggaccgtcggttatctacatggtggcggaaaccatccgccagtggtcgaaagaaggcgacggcgtcgtggtccacacccctgcctacgatgcgttctataacaccatcaccgctaaccggcggcggattgccccggtgccattgatcctgaaggataatcggtggcgctgcgatatggaccgcctggaggcggcgctggcggagccaaagaataccctgctgctgctgtgcagcccgcacaacccaacggggaaagtctggcgtcgcgaggagctggagaccatggcggccctgtgtcaaaaacatggcgtcagggtgattagcgacgaaattcatatggacatgacctggagcgaacaccgccatatcccgtggagcgaggtcgctcagggaccatgggcgctgttcacctccggttcgaagagcttcaatattccggcctttaccggggcctacggctttatccccgaagagaacgagcgcgacagctacctgcaggcgctaaagggtcgcgacgggctctcttccccttccgtgccggcgctggtcgcccatatcgccgcctaccgcgacggggctccctggctcgatgccctgcgcgactacctgcaggcgaatatgcgctatgtcgccgacacgctcaacaacgccttccccgcgctctgctggcagccgccggaggccacctacctggcatggatcgacctgcgcccgctcaacgttgacgatcgcgcgctacagcaggcgctgatcgccgaacagaaggtggcgattatgccgggttatacctatggtcctgagggcaacggctttctgcgactcaacgtcggctgcccacgcgagaagctggaacgcggtgtcgaaggactgattgccgccctgcgcagcctcagctgattcgacgcgcaatctacaggtcatcgcgccggcgaaacgccaggtaaccggcgccgagggtaaagacagcgacaatcaccaccagcaggataaacccgtggtggttgcttgccagcgggatcccaccgacgttcatgccgaagaaaccggcgacgatgttaatcggcagcgcgaggacggtgatcaccgtcagggtatagagggtgcgattgctctgctccagctggcgggcgccaatctcctcctgcagcagactgatgcgctcgatcaggcccgacagatcgttaagcaccacgctaaactcttcggtgaactgacgaaacgcctgcaccaccgcgcgatccatccacgccggcggccggttaagcagccggaacatcgccgccggctccggcgccagcagccgctggaagcgtaaaagcatccgccgtagccgcgccagatcggcccggttgcgctgcacgtgattgctcagaagacgctcttcaataaggtcaacatggcggctggcctggcggacgacctgctccagcacctcctcctgctcctccagcagaaaggccagcagctcagtagacgtgttcaccctgagcgtctgcaagcgcggcagcatccattcgataaaccgcaacggtttgaagcgcgccgtcaccaccagcctggggctacagtagagccacagcgtggcggtttccgcgctggtatcctgcggacgaaacagcacatcgttaagcacagcgaacagattttccccctgtcgctcaatgcgggtggtgtgcgagccgctgcggatctcctcgaagaaaaaatcggccaccggaaagtggctggttaaccatttctcggcggtggcatgattaagattcaggtgtaaccagataaacgccttgtcatcggcgagcgcctgatagcgggcgcatacctcgccagaggcgatcggctgcggggggcgctgttcatgaaacaaatagccatgcaccaggccggaaacttcactatcaaaatcgggctttaacatcttcgcggtgacgtcttgactcatggctccctcaggacaggcactggcaccgttgatgcccgaatattgtcatctttcgctattttccgcgggctggcaaggttaataatctggtcataaaacagtaacctggctgacatatgacggccagtatcacgcttcatcccctcgccgcgcaggcgatgcgatggaggcgaacagaaggtcttcttgcctttatgctcaggcggttattaaaataaatttgattatcctcaaaacttttttaggcggaaagcggtattaatttgcgcgcttaatcattgctttcacccaggtttattgaggaggagaccatgaaaacctatgaccgtaatcgtaacgctattgctaccggcagcatggtaatgatcgccggtaacgggacgacgggcgtgattaaagctatccatggcgaggggaaaaccgctgagcagctgcgccgggcggactgcgttgaaatcgacggctgcgagggccgcttctgcccgttggatctgatccgtctcggcttccattaattcctgccgccaggtcgttagtatcaggccacctgtggtggcctgctcttttcccgggaaataaagcgtctagcgaaagctccactgaacactcatcacaaagatcgccggcacaataatgccgccttccacaccgaaataatcggtgaaattatattgcaggccatgatagaggtagggcgaaaaaccgatgccggtgatttttttggcggtgcggtaggtgccggaatccccacagtggctgaaggcatcaaagaaaaattccccggtataggcatacacccctttcagtacccagccggtatcgtttttcagccagtcgcggcgcacgccgagggtcaggcaacgatcgtcaaagctgtttttcatcgttccgaccagcacgctgtattttgaatcctgagaaaacttgcgctccaccgagaaaaagttgttattgaaatgttcgttatattgtccgtggttacccgtcatatgatagacataggaaccggtattcatcgaatagaggtttaattccccggcctgcgccgacggcatggcaaccattagtagcgctgataacaaaatccataatttatttaccattcagtaacctatgccatacccgtaaaaagaacccggcatgctagcaccgcttagctaaaccaaagggcaatcagataaaccgacgctcttcgcggcgggaaaatatgacgctatctgcactatagcagtcgccctctagcctggtgagcgcctgcggttatactggagaaacattcccctaatcgttaaggaccgctgtgttagccactctcctcgttgcgctggtcgctattattcatctcgccatcctggtgctggagatgtttctctgggaagcccccgccgggcgccgggcctttaacctcagcgccgatttcgcccggcagacccgggtgctggcggccaaccagggcttgtataacggctttctggccgccggcctggcatgggggctgtggctgggggcgccgggggtgcaggtggttatctttttcctggcctgcgtgctggccgccgggattttcggcgcgctgaccgccagccgcaaaattctctatattcaggcgctgcccgcgctgctggcgctggttgccgtgctgacgcaagcgtagggccttgatccaaaacagagaaagcaggcgctaaggcgggtactatttgccccctttggtcggtcatcgaccgttaataccttctgagttcagaggcatttttatgacatggcaatccttcaaacaggcctggcttatccggttctggtctcctgtcccggcggtcattgccgcgggcattctctctacctactattttggcatcaccggcaccttctgggcggtgaccggcgaattcacccgctggggtggtcagctgctgcagctgctgggcgtccacagcgaacagtggggctattaccaactgatacatctcgaagggtcgccgctgacccgcatcgatggcaggatgatcatcggcatgttcggcggctgcctggccgccgcgctgtgggcgaataacgtcaaactgcgcctgccacgcagccggatccgcattgcgcaggccgtggcgggcggcatcatcgccgggttcggcgcacggctggcgatgggctgcaacctggcggccttcttcaccggcattccgcagttctccctgcacgcctggctgtttgccatcgccaccgccatcggctcctggtttggcgcccgcttcacgctgctgcccctttttcgcatcccggtaaaaatacaaaaggtgtccaccgcctcgccgttaacccaaaaaccgcagcaggcgcgccgccgtttccgcctggggatggtggtctttttcgccatgatcggctggggcctgctcaccgccgcagaccacacggcgctcggcctggcgatgctgttcggtattggctttggtctgcttatcgagcgcgcgcagatctgctttacctccgcctttcgcgatatgtggatcaccggccggacggtgatggcgaaggcgattatcttcggcatggcggcgagcgccatcggtatcttcagctatgtgcaattggggatggcgccgaaaattatgtgggccggtcctaatgcggcgattggcgggctactatttggctttggcatcgtgctggccggcggctgtgagaccggctggatgtatcgggcggtggagggccaggttcactactggtgggttgggctgggcaacgtcatcggctcaacgctgctcgcctggtgctgggacgatatcgccgcccccctcgccacccactggcagaaagtcaacctgctgaacgccttcggtccctttggcggactactggccacctatctgctgctgctgatcgccctgctgctggtgatcgcctgggagagacattttttccgccgccaggcggcggtccggaccgtgaaggagagcgcatgaaaaacatcatccctgattatcgcctggatatggtcggcgaaccctgcccgtatccggcggtcgctaccctggaggcaatgccttccctgcaaaaaggcgagatcctcgaagtggtcagcgactgtccgcagtcaatcaataacattccgcttgatgcaaggaaccacggctacacggtgctggatattcaacaggatggcccaaccattcgctatttgatccagaagtagcgccgtttttccgccggcggccttccccgccggcgcttgtctcctcgttcccgcctcgccgttcgcttacgcatcgctgaccaggtagccaaacgattgcaatagattgtaacacttgaaaccgtgttccagttacgcaataaccattaatataacgcgcctatattattaaaatgcgaataagttatttagtgaatggtttctgccgctatcggccaaagccgcacacagcgacacgataaggatcgaaatggaactgctggtcaggctgggtcatttttttgagcaagcgcgttctgacgccgactatgccaccttcgccaatgaactgcgtcggcatcaggtctcctactacatctattttgtttccaccggcaatatgaatttcgtaatggcaaacgacgaggtagtctcggtaaaaagcgcccgcgggctgctgcgcgttcgcgctgaggccagccattgtctgaccagggccgccgttatccgccactttgcccgggccattaactttgaacagtactgccgggatcttgccagcgccggggtatttaagtggatcgtcgatctggaagaggagacccggcactactggtcgaaggataatacgctgttatataaagagtgcctgatgcccccctgaacaggtctcagggggaggcggcgagggtcagcctttaatcgcgggtctgcacccaaaaggcgtggatcaggccaggaatatagcccagcagggtcaaaatgatattgagaataaacgcccagccgaagccttttcccagcagcacacccagcggcggcagaatgatagtgaaaacgattctccagaatcccataacctctcccttcgtctaacgtcaattttttactaagctattcaatagttaagcatagacgcttttcgtcgtttcgccagcaggcagccccctcatctctggtaacaaaaatcattccctgccgtcacgggcaaaaaagaccgggaaaacattcacttttcccctctccggcccgcaggccctggcaaagcgcacagattgtcagttgaccaatcagggggacagggctaagcctggaggagtttcatcacatcgagtcgttttaccaaccggagaatatccatgagtaaacttgggattaatggatttggtcgtatcggacgtctggtgttacgtcgtttattagaagtcgacagcagcctggaagtggtggctatcaacgacctcacttcgccaaaggtgctggcctacctgttgaagcatgattcaaactacggccccttcccgtggagcgtcgactttaccgaagatgcgctgatcgtcaacggcaaaaccattacggtgtatgccgaaaaagaggcgcagcatattccatggcaggcggcaggcgccgaggtgattgtggagtgtaccgggttctacacctcggccgagaaatcgcaagcccatctccaggccggcgcgcgcaaagtgctgatttccgcccccgccggcgagatgaaaaccatcgtctacaacgtcaacgatgacaccctgaccccggatgacaccatcatctccgtggcctcctgcaccaccaactgcctggcgccgatggccaaagttctgcaggatgccttcggcatcaccgtaggcaccatgaccaccatccacgcctataccggcacccagtctctggtggacgggccgcgcggaaaagatctgcgcgcctccagggcggcggcggaaaacgttatcccgcacactaccggcgcggcaaaagccattggcctggtgatccctgccctgagcggtaagctgaaaggccatgcccagcgcgtaccgaccaaaaccggctcagtgacggagctggtatcggtgctggagaaaaaggtgactgcggatgaggtcaatcaggcgatgaggcaggcggccgagggtaacgaatcctttggttacaccgaagaggagatcgtctcttccgatatcatcggcagccatttcggttcgatctacgatgctacccagctggagattgtggaggccggcggcgtacagctggtgaaaaccgtcgcctggtacgataacgaatacggctttgtcacccaactgatccgcgtgctggagaaatttgcccgctaagtgaacggcggacagcctgcgctgtccgccggttctgtgtggagtgcctcaggcctgcagatagaccacctgggtctgcaggtactcattcaggccgtggcggccatctgccccgccgatccccgacttacgccagccggcgtggaacccctgcatcgcctcaaagttctcacggttgatataggtttcgccaaacttcagtcccttaatcgctttcatcgccacgttcagatcgcgggtatagattgaggaggtcaggccataatcgctgtcattggccatcgccagcgcctcatcgagggtcgaaaaggccaccaccggcagcaccggaccgaaggtttcctcatggacaatgtccatctcctgacgtacatccagcagcagggtcggcggataaaaatagcctttgccctccagcggctgaccgcccagcgccacccgcgccccctgcgccactgccttcgccactttgcccgccacctggtcccgcgccgccgcgttgatcagcggccccatcgcgatgtcatcccgcgtcgccgggtcgccaaactggacggccttcatcgcctcaccgaggcggttgacgaagcggtcgtatattccctgctgaacatagacccgctcgacgcagttacacacctgcccggtgttaatcacccgcgagtccactaccgctttcaccgccagctccagatccgcatcgtccattacaatggcaggcgctttgccgccgagctcgaggcacactttggtgatatttttcgccgcagcggccataattttttctcccgccgccacgctgccggtcatgctgaccatcgccaccttcggattgccggccagctcctggccgacggtttccccacggccgagcacaaggttaaagacccctttcggcaacccaacctgatggacaatctcggcaaaggcgatggcattattgggcgtaaattcgctgggcttaatgacgatggtatttccagtgatcagggccggcgccagcttgcgggcgataagaaagaatgggaagttccacggcaggatcccggtggtcacccccagcgcgcgtttaaagacaaggatattctcccccgggcgatcgctctggacgatctcaccttcgtaacggcgcgcccattctgccatatagtcgagatagtccgcggtgaacgcaacctccaccgccgccagctgctggatcttgccgccttcagcgacaatcagcccggcgatctcgtcggcacgctgacggataccggcggcaattttgcgcagccagcccgcacgctcaatggccggcagcgcttcccagccgggctgggcgcgctcggcggcgtcaatcgccagccgtgcctcttcggcagtcccgtccgggatccgcgacagcagcgcttcggtcgccgggttaagcacgtcgatccagccgtcgccgcgaccggaaacgaactggccatcaatatacatcgggtgttgaacgggtgctgtcatggctgctcctgtggtgcatttgtatttaacaggtgatttttttgttaaatatcgggcggataagccgctgttcggcagcacattgacgcagttctgtgagctgattcataaaaccgggccaaaaatgcccgcttgaggttacattttaataacacaaattgcccgtttgcgacgaatctgccgtaaacgggcatttttcagccgagggtgcgggcctgcagcgccccggcgagctgggcgtcctcccgcagctgtcgccaggcgtcgaggatctccggcgggaaggtgacatggctgatgaagtcttttccccgcggaccgtacccttcaggggtatcctgcaggcgcggcagctcgcccagcagcagcgccaggtagcgggtgaccggccagagccccgctccgccgcccgcgaaccccagttggccatcggtctgctccagcaccggcgagcagccgggaaagctcaaccactgcggcggcgtcgtcgccccctgccagacgcgggcgaaggtagccatggttcgccgctgcatagtcgggtcctgaatgacgatcccgcgacaatgggcgagcccccggctctccagcgtggtccgggtaaaacgggcgttctcaccgcagttggttgactggtcctccaccaccagccgcgaatgggggatgtgccagtagtcatgagcaatgtcggccagaatatgcgcttccgggcggccatccaccggcaacgtacggtaacggggatcctggcgcaccgcctcgtagagatagcccgtagaatgtcccacgccgccgctgatcagcagcgggaccgcctgcgccgccgccagacggcaggcggcgtcgatggttgggatcacggcgttgccggccagcactaccacgtccacctgcggcagcgcgggcagcgtcgccagatcgtcctgcgccagccaggcgccgacctggttagccgccgccagcgtcgctgccgacagcggaggaaattgttctgccattctgtctccttaatcctctctcagccgagcggagaggatgctttcgctatcataaacgccgcctgccgggaggcatagcggcgtcgatttgtaaccattttgaaataacaagaaacatctaaaaacaggcgggttgcacctgaacaactcactatgaaaataacaaaaaacagcaaaatcaggtggaaaataaaaaatagcgtcgcggttataccagttcaaagcgcgccataatgcccagtttgccagccataaacttgccaattgtaaccttcaaccctaagttgcttaacaattacacaaccttttcacatcaggttgcaccctgctcgtacagagtgacacctgacctatctaccgtggcgggagaacgtttcgtaatgagcaatccacaagacaacactgcatccattctgcaaaaaaacaagaaggtactgatcgcgagcctgacaggcagcgccatcgaatggttcgattattttctctatggcaccgccgccgcgctggtgttcaacaaaatcttctttccgatggtcgacccggttatcggcctgatcctctcctggctctccttctcgctgacgttttttatccgccccatcggcggcgtgattttcgcccatatcggcgatcgcatcggccgcaagaagacgctggtgctgaccctgtcgctgatgggcagcgccacggtggcgatcggcctgctgcccacctacgagatggtgggcctctgggcgccggccctgctgattactctgcgcattattcagggcatgggtatcggcggcgaatggggcggcgcgctgctgctggcctatgaatacgcgccggaaaagcggaaaggctttttcggcagcattccccaggccggggtgaccatcggcatgttgatggcgacatttatcgtctcgctgatgacgctgttcgatgaggcgcagtttctcgcctggggctggcgcataccgttcctgctcagctctgtcctcgtttttctcggcctgtggatccgcaaagatatcgacgaaacgcccgcctttaagcaggtgaaaaaatccggccaggtggcgaaggccccgctgcacgaaacgctcaagcaccactggcgggaagtgctgatcgccgccggcctgaaagtggtggagaccgcccccttctatatcttctccacctttgtggtcagctacgccaccaccaccctgagctatcagaagtcgcaggcgctggaatccgtgaccctgggcgcgctggtggccaccgtgatgatcccgctgatggggctgctgtcagacaaggtgggtcggcaaaagatgtacaccctgagcgtggtgctgctggggctgtttatcgtcccgtggttcctgctgctcgacaccggcaccggctggggcatcatgctggcgacgaccgttgccttcggcatcctgtgggcgccggtaaccgcggtgctcggcaccctgtgctctgagattttcagcgccaatgtgcgctataccgggatcaccctcggctaccagctgggcgccgcgctggccgggggcaccgcgccgcttatcgccaccggtctgctggcgaaatatgacggtgactggcggccagtggccatttatctgggcattacggtggcgatttcgctcctggcgatattctgcgccagccggatgaagtccgcgctgggcacggccccctcccgggcggaaagcgcctgaccgcagcccgccagggctactacggcgccgactatcccgcccggcggcgctgcgcttgcgcgggcctggggagagatcgcgcggcgggggaaaccgcttatcccaggtccggtaagcatgtaggcccggtaaggcgccagccgccaccgggcacaaacaggcgtcaagtcttcccccctgcttagccggccgccaggaccggcgggtgtcaggcgctctggttgtccagctgaagctgcccctcgcgccgctgcttcagcttccagaagccccacagcgcgataaaccacagcggagaagccaacagcgccagcagcgtgtccaggtcaaagatcatgatgaagatagcgaacgcgaagaacagcaggctcacccagctcatcaccaccccggcgggcatcttaaagatcgacccggcgtgcaggtccggacgctgacggcggtaaaccagataggccacgaggatcatcccccagctgaataccaccataatcgccgccagggtcgagacgatggtgaacagggtcatcacgttcggcaccagaaacagcaacagcgtgccgatcagcatgcagaagcaggagaacagcaggctgcgcaccggaatgcgggtactgcgcgacaggatacgaaactgccagtgcgcatgcttctccaccgacaggccgtacagcatgcgggtgctggagaagaccccgctgttggccgaggacatcgccgaggtcagcgccacaaagttaatcaccgccgcggcggcaggcagcccggccttggcgaacagcgtcacgaaggggctggtctccgccgacacccccggccacgaggcgacagcgatgatcaccaccatcgacagcagatagaagatgataatccgcagcggcagagcattgatcgccttgggcaaaatgcgctgcggatcgcgggtctccgccgtcatggtgcccagcagctcaatgccggtaaaggagaagatcgctatctggaagccggcgaaaaagccggtgatgccgtggggcataaaggccgtcgggtcggtgagatggctgagggaagccgtcacgccgtccggggaggtccagccggtggcaatcatccagccgccggtgccgatcagggcgataatggtgatcaccttgatcagggcgaaccagaactccgcctcgccaaacattttcaccgacagcaggttaagcaggaacagaatcgccagcatgctgagggccggcatccacgccgacagttccgggaaccagtactgcatatagctcccgcagaccaccacgtcggcgatacaggtcaccacccagcttagccagtaggtccagccgaggtaaaagctggcctgcggcccgagatactcgccgacaaagtcggcaaacgagcggtagtcatggcgggtgagcagcagctctcccatcgcccgcatcaccatataggtaaagaacccgaccagcacatagataaccaggatcgaggtgccggcgacggcgatgttgcgccccgcccccataaacagcccggtgccgatggcgcccccgagggcaatcatctggatatggcgggcgctgagcccgcgcttaagctgtgacgcgccttcacctccggcggcaggtgacgcctgatgttgatgttcagtcatggtgtttcctcaggctggttgcgggagacgaaggtcagcggcgcggagcaacagcccggcgcgctggccggtggcgaccccggcgttgggaaagaggatatagggggcccgggcctgcaccacccaacgtttctctgcctggcgggcgatctcataccctgccgggagcgcggtgaagttttcaacgtctgccgcgagattaagcgtaaattccccctcgcgcttgatgatgctctcctcgaccaggaagtagtccaccggcgctttgtcgcgcggcggcagcggcgcatcagcgatccaggcccggatcgccgcgtcggcggcggcgaacaggctgagatcgttggcgccgaacggcatcactttccccagctccagggtggcgctttgcgcggcgaacttttcgcaggtgaaatgggtgaaggtgccgcccgcttcggtatggcgcacgacggcgtccatcccgctggcctgcagcagctgatagaaatcgggcgaaaaatccccggcgtgggccgggagcagcgcaaactggcgatacagcgatccgcgaatggcggtgtgcatatcgagatgaccacggttgaccggccccgccgcatcggcggcgcgataaaaagcctgcaccgcctgctccagcgcaaaagcccgccgcgactcatttcccggggtgaccgccagatggcggccgccgaacaggcgattcaggtcgttatgcagatagcgacgcgcggcgcggatcgccggcagattaccaaagacgatcagcagcgcctgcgtgagcggctgccgcccctggctcagatcgtgggttagctgcagcagcagttcaatcggcgcggtctcattgccatgcacgccggcggagaggatcgtcgcctggcgccacggcgccgtcggcagcagctgtaaaatgccctcgcccagccagcgggcctcgatgcccgccggaaaggtccacgcctgcaggcggcagtgcagtaaatcgttaaccaggtgctccatctgccgctccttaacgctgaaaatcatagaccgcgcccaggcgcaggatctgcgtcagctcatccagcgcctgataaacctcgcgcagcagctgcgggtccgccagatcgcgggcatgcagccggtcgcgatagtgtttttccacccatgccgtcagctgctgataacgttcgtcgttcatcaggctatgggcgttgaccgcctggcgctccgcctcgttgagcaccactcgcagccgcagacaggccgggccgccgccgttgcgcatgctttcccgcaggtcaaagaccgccacttcatcgatcggcgatgcgctgtcggcggcgagatcgctgagatagcgccagacgttttcccgctggcggcactcctccggcaccacgatcagcatcttaccgtcaggtttgctcagcagctggctgttgaacaggtatgaggccacggcgtcatcgagcgaaacccgctcgtccggcacttccacgctggtgaacgggatatccagactgtcgcttttagcccgcagcgtggtcagcaccgccgcctgatcgacaaacgcctgctgatggtggaacagcacatggcgattgctgaccgcgatgacgtcgttatgaaacacgccgcgatcgatagcctgcggcgcctgctgggcaaacaccgtgtagcgcggatccagctgatgcaggcgggccaccgcttcgctggcctcgagggtctgccgcgccggatacttcaccggggcgataccgccgctggcgcgtcgaccatagacgaaaaactgcaccccctgccggtcatattcccggcagaagcggttatggttggccgccccttcatcgccgaggtcgccatgctgcggcagcgccgcatggtgggcaaagtagcgcggatcggcgaacgtggcgccaaggatcgccgaggtggtgggtgcctcctgcatacggtgcagcttattgttcaggttggcgacggtaaaatggactttgccatcggcgctgtccgccgacggtgagacagtcgccgcgttggcggtccacatcgacgaggcggagctgaaggcggagagcagctgcggcgccgcgtgggccgcctgccggataacctgctcatcgctgccctggaaacccacttcgcgcagcagacgcagattcggccgcggctgcggcggcagaatgccctgcacgaagccgcgatcggccagggctttcattttatacagcccctgcagcgccgcctttttagggttagagagaccatcgcggttattttgcgaggcttcattgccgacggagagtccggcgtagtggtgcgtcgggccgaccaggccatcaaagtttgcttcaaaaccagacatatgtcctcacaggatccgttatcagaatggcaggcccggcgataccgtcgccggaagcgtcagcgtatcgctgaccagagaggccatcggccaggcacagtagtcggcggcgtaccacgctgccgcgcgatggttgccggaggcgcccaccccgccaaacggcgctttactcgatgcgccggtcagcggcttgttccagttgacgatcccggctcgcgcctcgtccgccagctgatcaaactgcgccgcatcgctggagatcagcccgacggccaggccatagcgggtctgattggcgaggcgaatcgcctccgggaagccgtcgtaacggataatcgtcagcagcgggccaaagtactcttcatccggcacctcaataccggtgacttcgacgatccccggggtcagcaccgtggagcgcgggtcaggctggcgcatgcgtagcagcaccttgccgccgagcccctccagtttttgctgcgccgccagcatgttctgcgcagcgtcgagagagatcaccccgcccataaacggcgccggctgatcatcccacttgccggcgcggatctgcgcgctggcctctaccagccgctgcagcagcgcatccccctgctcgccgcgcggcacgatcagccggcgcgcgcaggtgcagcgctgcccggcagagataaacgccgactggataatcacatgcagcgccgcatcgatatcggccacgtcggcgacgatcagtgcgttgttgccgcccatctcgagggccagcatcttctccggctggccgccgaagtagcgatggaagtggaaaccggccgccgcgctgccggtgaacagcacgccgtcgatatcacgattttccagcagcgcctggccggtggcttttccgccctgcagcaggttgatcgccccgtcggggatgcccgcctgctgccacagctggacggtcatttcagcggtagccggcgtcagctcgctgggtttaaacacaatggtgttcccggcgatcagcgccggaatgatatgtccgttgggcaggtggcccgggaagttgtaggggccaaagaccgccatcacgccgtgcggtttgtggcgcagcagcgctttaccgtccggcagcgtcgactcatgaaagcccgtccgctggtgataggcttcgatggagatcgcggccttgccgatcatcgcctgcacttcggtgcgggtctcccacagcggcttgctggtctcgcgggaaatcagggtcgccagcgcctctttatgcgtctccagcagcgcggcaaaacgctgtacgacgtcaatacgctcggccagcggccggtgcgaccagggataaaacgccgcgcgcgccgcggcgcaggccgcctggacgtcgtcagcccccgcgctggccgcctgccacagcagcgactgatcctccggggccagtttgctcatcgttgcgccgctgcctggcagccactgcccggctataaactgtgcttttaccgccatgatctgttgtcctctggattcagggttaccgtataaacgcggtcggtttcactgacctgcagcgcgtccagcgcggcgctgtcaagcgagacctgctcttcgtgggccaccagcagcgcccgaaagttgtcgaattgaccgttggcgacgagggtcggcgccggcaggtcgcccatcagctgccggacaggcaggctctggctgtcgcgcacggcgcggatctgatcggtgtccgcctccagcaccggaccggcatcgaaaatatccaccgagccgcgccagctgaaaccctctttctcgaggatcgcccgcgccggggcggtattgggatgcacctgaccgatgaccccgcgggccgcttccggcagcagtgagatatagatcgggtacgccggcatcagttcggcaataaaggttttcatgccggtgccggtcagccggtcggcatcggcgaacgggatgtcgaagaaatgatggcccagcgcatcccagaacggcgactgtccctgctcatcgctgcagccgcgcagttcggcaaacaggtgcggggagaaccactcgcgaaaggcggcgataaataaaaagcgcgccttggagagcagcagaccattgcggttgcgctgatacgccgggtcgagaaacagcgtacacagttcgctgtgcccggtgtggtcatagctgagattaagcagctcctggggcttatagactcccagcgctttcgaggcgcgcaccgttttctgaatgcgaaaattgtaaaacggctcatccaggcccactgcgacctcaatggcgctcacccccaccacccgcgccagcgcggtgtcctccagcacaaacaggaaaccctgctgactgcgcggcagttcgccggcgaaggtctcgatactgcgccggatccgggccgccaggcgcccgacgtcatgcggtaaagaggtcatgccgacccccgcccgcgcggcgaggcggacgatgtcgtcgagatcgttttcccgtacgggacgaaatagcatcacaggccgtcctcccggttagcgggttaagcgggcaacggcgcgatcaaggcgcacgaaggcttccgcaatatccgccagcgggatattgagcgccggcgcgaagcgcagcacgtccgggccggcaatcagggcgatcagcccctcttccgccgccaggttggtcaacgttttggccttgccgcgcagcggccccgccagctcagcgccgatcagcagaccggtgccgcgcacggcgctgaacgcatcgtaacgggcagagatcgcattcaactggtcaacgatcagcgcatggcgctcgccaacgcccgccagcagcggcgcatcgagatgggccagcacggcgttagcgacggttgccgccagcgggttgccgccgaaggtggtgccatgggtgcctggctggaagacctgcgcccaggcctctttcgccagcatcgcgccgatcgggaagccgccccccagccctttggcgctggtgagaatgtccgggacgacgttgtaatgctggtaggcgtagagatggccggtacgcccggcgccggtctgcacctcatcgaatatcagggtggcatgatggcgatcgcagagggtacgcagcgcctgcaggaacgccgggtccgccgggatcaccccgccttcgccgataatcggctcgacgatcaccgcgcaggtgcgcgaggagatcgccgcggtgaccgcctcgatatcgttatagggcagatgggtaatgccctgcggcagcggagcataatcgctggaatatttcggctggccgccaacggagacggtgaacagcgtgcggccgtggaaggcgtggttgaaggcgatgatttcgcttttttcaccgccaaacttatcgtgggcatatttccgcgccagcttaagggccgcctcgttggcttcggcgccggagttgcagaaaaacaccttgtcggcaaaggtcgactgcacgagggttttcgccagctgcagcaccggctcgttggtatagccattgccgatatgccacagtttcgccagttgatcctgcagggcctgagccagcgccgggtgagcatggcccagggcgttcactgcgatgccgcccgccatatcgatatactctttcccctgctggtcccagacgcgggagcccgccgctctgaccggaataaacggcgcgggggcaaaacagggaaccaggtaagcgtcaaaatcttcgcgagtcatactgcctgacataatttatctccggaacgtaagacgacggaaaacgctcccgtcgcggtggacaatcgacatcaaccctgcccctcggcttattttggacacgagcgcgcccgctgcgatggtaaaaatattcaccacagaaaaataaagccctattctttttacgggtaattgttaattcatggttaatgccatgttgttgtgtgggctaatgctggcctgtgaacaacaagattgtcaatacggacaaaagcaatttattcactttttgaagatcatcaagataatgaaaaacatagaaaaaatattttattatgcacttaagtgaataaaaagtgaattaaaatgcacagcttgcgggtggttgacgtgcgtagttattcacttaaaaaataaaaaatctaacaaaaatttaaaaatcggaattgccgtcaaataccgctttataaaattggtgataccattcattgcacagagtttactgctgtagctattccacggttttacacgacataaataacactgagaaacaggactcttatggaaaagttatcttacgcatctgaaagtagtacatctccatggaccacctacctgcgccagatcgaccgcgtcgcgccttatctcggcgatcttgcctactgggtggaaaccctgcgccatccgaagcgcgcgctgatcgtcgacattcctgtgcaaatggacgacggcaccatccgccacttcgagggctatcgcgttcagcacaatctgtcgcgcggaccgggtaaaggtggtgttcgctaccatccggatgtcgatcttaacgaagtcatggcactttctgcctggatgaccattaagtgcgccgcggtcaatattccttacggcggggccaaaggcggcatccgcgtcgaccccttctccttgtcggaaggtgaactggaacgtctgacccgccgctacaccagcgaaatcggcattattatcgggccgcagaaagatattccggcgccggacgtcggcaccaatggcaaagtgatggcatggatgatggacacctactccatgaaccatggcaccaccatcaccggcgtggtcaccggcaaaccgatccacctcggcggctccctcggtcgtgaaaaagccaccggacgcggcgtgtttgtcaccggccgggaagttgcccgtcgcgccggtatcgaaattgaaggcgccaaagtggcgctgcagggctttggtaacgtcggtagcgaagcggcccgcctgttcgccggcgtcggcgctcgtatcgtggttattcaggatcataccgcgaccctgtataacgaaggcggaatcgatatggccgccctcaccgcctggcaggcggagaaaaagcagattgccggtttcccgggcgcccaggagatcgataaagacgccttctggaccactccgatggacatcctgatcccggcggcgctggaagggcaaatcacccgcgagcgcgcggagaagctgacctgcaaactggtgctggaaggggccaacggcccaacctatccggaagcggacgacgtgctggccgagcgcggcgtgatcgtggtgccggacgttatctgcaacgccggcggggtgaccgtcagctactttgagtgggtacaggacatggccagcttcttctggagcgaagaggagatcaacgccaagatggaccgcattatgaccgacgctatcgtgcacgtctgggataaagccgccgagaaagagtgtacgctgcgcaccgccgcctatatcgtggcctgcgagcgcatcctgatggcgcgtaaagaccgcggcatctacccgggctgatccccatcagcaaccgcatcaggggtggccttgcgccgcccctttttttctttgccgcgccgttaaccgccgaggatgtgcgctatctgacgaggagttgttcggcaaaggtgacaacgtcacgcaagtaataaccatccgctgcccgtaggggattatttttcgattaaatcaaagtcgccctgggtatagcgtaagccagtgacgttgtcggcagtgaaaatatgttcgatggtgaggatgtcctccgccgcgagggtaatattcgcggcgccggcattgtcgcgcaggtgagcaattttcctcgcccccgggataggcacgatatcctcgcctttgctcatcacccaggcaagggcaatctgcgcaagggtcgcgtcatagcgggtggccacctgctgcaggcgctcaagcagcagctggtttttgcgcatggtttcggcctggaagcgcggcagatggcggcggaaatcatccgctgccaaaacgccgggatcggtaattgtccccgtcaggaagccgcggccaagcgggctgtatggcacaaagccgacccccagctcgcggcaggtgtggagaataccggcctccggctcgcggctccatagcgaatattccgtctgcacggcagcgatcggatgtaccttgcaggcccggcgcagcgtctgagcagatacttccgacagaccgatatggcgaattttaccctctttaaccagatcggccatagtgcccaccacctcttccaccggtaccgcgggatcgacgcggtgctgatagagcagatcgatggtctcgacattcagtcgcttcagcgacccttccactgattcgcgaatatgtgccggacggctgtcaacgccggccatccgctccagaccctggccggtcggcaaaatacgaaatccaaatttggtggcaatctgcaccttatcgcgaaaacctttaatcgcttttccgaccagaacttcattatcgaaaggaccatatacttcggcggtatccaggaaggtcacgcccatgtccatggcggcatggatcgtatttatcgcctgcgacgtttcagcgccgccataggcaaaactcatacccatacatccgagacctaatgcggaaacctgaaacttctcttttccaagataacgtgttttcatcttattttccttaattgctgaatggcattaaatatatacttccctttcatattgataacaattaatctattccgaacgcggtgttagctggaaattaacaatgaaaaccttgcccgatctgcaacaaatagaaatattaatactcatagtgaaacatggcagttttcgtcaggccgctaaagcgttaaacctttccccaccggcccttaccgtcgctattaatcatctggaagaaaagttaggcgtgcgcctgctaaatcgctcaacgcgcagtttgtcattaaccgcagtgggtgaggaatttcttaataatataacgccggtggtcaatgattatcgccgggtggtggacagtctgaattatcaccgtctgactccggaaggcgtggtgaaagttaatttaccgcgcattgttattgacctgttttttcaagactattttatcgcctttaaaaacgcctgtcccaatgtgacgctcgaactgtatgccaccgatcggaaagtcaatattatcgagtccggttttgacgccggcattcgctattcgcaggatgtgcccaaagagatgattgccatcccctttggcgagaaactatcgctgatcccggtggccagcccggactatatacgcgaagccggagagcccgacaccccgcagtcattagttaatttccgctgcattaaccgttgttttcctggtggtgagaagtaccgctgggagtttattggccccagcggcgagcttagcgaggtcgcggttaaaggcgatctggtcgtcgatgccgatagcgcaatgatccaggccgcggagagcggattaggcatcgcctttgtctatcagtcgctggtgacgcagcagctgagcgcgggcagcctggtccatttgttacccggctaccgctatcctgccgaccatttctgcgtctactacccaagccggaaacatactcccgcccccctgcgggcctttatcgcctgggtgatggcgcagaataaaaatatcctcggtcagcagaccgcacgacacagatcgcggccggaagattaactacaattaacgtacataccgttaaccaatttctatctttcatcttgaactccggcggttatccggcataaaatcgttagagctctaacgatattgacagacgacctatggacaatcgacagcttaccttctctcatcttttatacctcaccgcgcaccactggcggctggcggtcaatcgtcggctgaaaaatctcggtctcagccaggccagctgggtggcggtagcgtccatcgcccgccaccagcagccgctgtcgcaaagcgaactggcgcaggagctgggggtggagagcccgaccattgtgccgttgatccatcgtctggtcgccctcggactggttgagcgcatcaccaccgccagcgacaaacgtaagcgactgctggtggtcaccgacaaagggaaggccctctatgaacaggtcaaaacggtggctgacgatctgcgcgaagagatcctgacggcgattaccccacaggagcaggagcaaacccagcgggtgctggaaaagctgttgcgcgaagtggagaagaaataatgccccgtcgccaggataacccctacgccccgcatgactgggcgccgcatgaaaaaccggctctgctcggttcgccgtcgacgccgctgcacagtccggcgaaacgccttgcctacggcgtggtcggtctgctggtatgtctcaccggcgcgctgggcaacgcagtggtcaccgccaacctgcagctgctgcagggtaccttcgccgcctggtcgacagaaatcgcctggctgccggcggtatacgtgatgaccaacgtctccatcaacctgctgctggtgaaattccgccagcagtttggcctgcgcgctttcaccgaaggctttctggtgctctatgtgctggtcacctttttccacctcttcgtcaacgatctcagctcagcgatgatggttcgcgccgcccatggcatggtggccgcggcgctcagctcgctggggatttactaccaggtacaggcctggcctgcgcgccatcgcctgaaagggctgactatcggcatcaccggctcgtcgctggccattcccctggcgcgcctcttttccaccgaactgctgcagaccgatgaatggcgcggtctctacttctttgagctgggcctggcgctggtgtcgctggcctgcgtcatcgcgctaaaactgccgccaagcgatcgtaaaaaagtgttcgaaaaaaaggatttcattaccttctttctgctggcgcccggcatggcgctggtgtgcgccgtgctgtcgctaggtcggctcgagtggtggtttgaagcgccgtggatcggctgggcgctggcggcggcggtaatactgatcgtcgctgcgattaccttcgagcataaccgcagcaaccccctgctcaataccaaatggctctccagcggcagcatcgtgcgtctgggcctgattatgctgttgatccgcatcgtgttggcggagcagaacaccggggtcatcggctggctgcagtacgttggcctgcaaaacgaacagatgactaacctcgcgtggtcgattttcgccggtattctgtgcgggatcattgccagctgtctgacgctcaacccgcagaagctctactggccgaccgccaccgcgctggcgctgatcatgatagcctcgctgctcgacagccagtccaacgccctcacccgtccggaacaattaatgttcagccagtttttactcggcttcggcagcgccttctttctggccccggcgatgctcgccgggattggcggcgtgtttgccgacccgcgcaacctggtcagcttctcggtgctgttcggcatgagccagaacattggcgggctgctcggctcggcgatcctcggcaccttccagacctggcgtgagaaattccactccagccagctggcggaccagataaccacccttaacccgctgatcgtcgagcggctgcagcagtacagccagatgtatcagagccagattggcgacagtacgctgctcaacgttcaggccaccaccctgctgcaaaacgccgcgacgctgcaggctaatattctcgcctggaatgatacctatctgctgacggcggcgatctccgccgggacactagtgtgggttttctggcgcttaattcgcttacgactgactgcccgtatcgcgttgcaacgcgctaccggcagcaaataattatcatcatttcatctctggagtcgttatgagtcagcaggatgcggccaaacaacaggccaacacccggaataatattcgcgtggtttccatttttaccgccgcggcgataggcctcgtcggcgtgctggtgatcctctacgcctggcaactgccgccgttcactcgccatagccagtttaccgacaacgcctatgtgcgcgggcagaccacctttattagcccgcaggtcaacggctatatcaccgccgtcaacgtcaaagatttcgcgattgtccagccgggcgaggtgctgttccagatagacgatcgcatctataaacagcgggtgcatcaggcccaggctaccctggcgatgaaagaggccgcgctgcgcaacaacctgcaacagcgcaaaagcgccgaggcgacgatcgccaagaatgaagccgcgctgcaaaacgcccgcgcgcagaatctgaaaatccaggccgatttaaaacgcatccagcagttaaccgccgacggttcgctgtcgatccgcgaacgtgattcggcgcgggccagcgcggcgcaaggggcggcggatattgagcaggcgaaagcggcgctggagatgtcgcgccaggaccgtgaatcgaccatcgtcaatcgcgattcgctggaggccgacgtggccagcgccaaagcggcgcttgagctggcgcagatcgacctgcagaatacccagattatcgcccccaccggcggccagctggggcagatctcggtgcgtcttggcgcctatgtcagcgcagggacccatctgacctcgctggttccgccgcagcactgggtgattgccaacctcaaagagacccagctggccgaagtacgcgttggccagccggtcaccttcaccgtagacgcgctcaacggcgagaccttccacggcaaggtgcagagtatctccccggcgaccggggtggagttcagcgccatctctccggacaacgccaccggcaatttcgtcaagatcgcccagcgcatcccggtgcgtattacggtcaacgacgggcaaaacaacagcgaacgcctgcggccggggatgtcggtgcaggtgactattgatacccgtgcggagaaacaaccatgatccgcccggtcgcccttgctatcgttctggcgctggtcggctgtcaatccgccgatgtgcagcgcgcgcagccgaccctgaccattcctgccgcctggcgggccgacgttggcccggccagcccggtggagggcgtatggtggcgcaattttcatgacagtaccctcaatcagtatgtcgaccaggcgctgcgctataacagcgatgtgctgatcgcccgcgagcgggtgaatgagtatcaggcgcgcgcttacgccgccgacagcagcctgtttccgtcactggacgccagcctcaccggcacccgcgcccggacgcagtccgccgccaccggcctgccgatccacagcacactgtataagggcggcctgaccgccagctatgatgtcgatatctggggagcgaaccgcagcgcggccaacgccgccggggccagccttgaggcgcagaaagccgccgccgccgccgccaatttgagcgtcgccagctcggtggccgttggctacgtcacgctgctgtcgctggatgagcagctgcgggtgacccagcagacgctaacatcaagggaagacgcgtggcgcctggccaaacgtcagtttgaaaccgggtatacttcacgccttgagctaatgcaggcggattcggagctgcggtcaacgcgggcgcagatcccgccgctacagcaccagattgcgcagcaggaaaatgcgctcagcgtgctgctcggcgataaccctggcgcggtaaaacgcggcgagttcgcccagcttaccccgctgcgtctgccgtcgcagctgccgtccaccttgctcaaccgccgtccggacatcgctcaggccgagcgccagctggtggccgccgacgccacgctggcctcgtcgcaggcgcagctgctgccctctattaacctgaccgctaccggcagcctgcaggaccggacgctgccggatctgctggacaacccgctgcggctgtggagtcttggcggcagtattctggcgccgctgctaaaccgccaggcgttaaatgcccaggtggacgtctccatggcccagcgcaatcaggcgctctatagctatgagaaaacggtgcgcagcgcgttcaaagaggtcaatgacagcctggacgccatcagtcgctatggcgaacagttaaccgagcttcaggaacaagagaccgttgcccaggaaaccttacgtattgcacaaaaccgctaccgtaacggctactcttcttatctggatgtgcttgatgcccagcgaacgctgttctccacccagcttagcgtggtgcaggtgaagaacaacctgctgctggcgcagatcgatctgtaccgggcgctgggaggcggctggtctgactcatcagggagctaaatggggaagcgtcatatgcaacaacagtggtcggcagtagacaattatttgattaaggccttaattcccagcgatcctgtgctcgatcgggtactggaaaacaaccatcgtgccgggctcccggcacacgatgtcgccgccaatcagggtcagtttctcgccctgctggtacggctaacccaggctaagcggatactggagatcggcaccctcggcggctatagcaccatctggatggcgcgcgagcttcctgcagacggccaactcctcaccctggaggccgacgcgcatcatgcccaggtggcgcgggagaatctgcagctggcgggcgttgaccagcaggtcacgctacgggagggacccgcgctacagtccctggaggcgcttggcgcatgtcccgctttcgacctgatcttcatcgatgccgataagccgaataatccccattatctgcgctgggcgctacgttattcccgcccaggaaccctaattattggcgataacgtggtacgcgacggcgaagtggtcaacccacagagcgccgacgagcgcgttcagggcgtgcgtcagttcattgagatgatgggcgccgagccgcggttgacggcaacggcgctgcaaaccgtgggcactaaaggctgggacggctttactctggcgtgggtaaacgcttaagcgtggacgcctgaccagtagccccggtaagcgcagcgccaccggggacaaccagccaggctatggggtaatttgctccatcgcctgcaacactcgcttgtccgagataggatacggggtgcccagctgctgggcgaagaagctgacccgcagctcctcgatcatccagcggatctcccggacatcgtcgtcctcacggcggttcggcggtagcttattcagccactgctgccacgcctgctgcacgctctccaccttaagcatctgcgcccgatcgcggtgcggatcgatagccatcttctccagacgcttttcaatcgcctgcagatagcgcagcgtatcgccaagacggcggaaaccgttgccggtgacaaagccgcgatacaccagacccgccatctgcgctttgatatccgacagccccagcgccatggtcatatccacccggcctttcagccgtttgttgatattgaacaccgcggtgaggatctgctcgaccagtttagcgatctccaccaccgtgtcgttgagctcggctcgcactttatcgtgcagctgactaaagccctcttccgtccacaccggaccgcccgcctcgtcgataagcttatcaacgccgcaggagatgcaatcgtcaatcagatccagcactttgccgtacgggttaaagtagagcccaagcttggctttattcggtaatttctcgtgcagatacttaatcggcgacgggatgttgagcagcagcaggcgacgcagaccgcgccacatggcctgctgctgttcctgtggattatcaaacagcttgatggccacgctgtcgcgctcgtccaccagcgccggccaggctttcaccttatagttaccgcgcttctgttcgtaactttccgccagggtgccaaagctccagatatgcagcccgctctgctcaataccgtcatcagcgaccgccgacagcgtctcctgcactttgcccttcagggcgtctttcaacgcctgcagcgagcgcccttcctgcagcttcttgtttttatcatccaccacccggaaagtgattttcaggtgatcgggcacctgatcccactgccaggcttcgcggtcgatggtcacgccggtcatcttacgcagctcgcgctccagcgaatcgagcagcggcagctcaagcggcgtcgcccggccaagaaacgcttccgcatagttgggagccgggacgaaattgcgccgtaccggcttcggcagcgattttatcagcgcgataatgagctcgcgacgcagaccagggatctgccattcaaatccggcctcctctacctggttgagcagcggcagcggaatatgcaccgtcacgccatcggcgtcggcgccaggttcaaactggtagctaagccgcagcttgaggttgccctgatgccagaagttcgggtagtccagtttactgacctgctccgccccctctttaatcagcatgctcttttcaaaattgagcaagtctggcgtttcgcggctggcctgcttccaccacttatcaaagtggcgagcggagatgacatcgtggctaatgcgctggtcgtaaaactcgaacagcgtctcgtcatcaaccaggatgtcgcgacggcgcgacttatgctccagctcttcgatttccgcccgcagcttcaggttttcgcggaagaaggcgtgccgcgtctgccagtcgccctctaccagcgcgtggcggataaatagctcacgacacagcgccggatcaatctggctgtagttgaccttacgcgcggcgacgatcggcaggccgtaaacggtaaccttttccgtcgccattaccgcgccctgcgaccgctcccagtgcggctcactgtatgagcgcttgatcaggtgctgcgctaccggctccacccactccggctcaatgcgggcggcaatacgcccccacaggcggctggtctcgaccagctcggcaaccatcgtccacttcggcggctttttaaacaggccggaacccgggaaaatggagaagcgggcgttacgggcgccggtaaactcctgtttatcggcatccttcatgccgatgtgcgacagcagaccggtcagcaacgcagtatggatctcgcgatattccgccggctcactgttgatcggcaggccaagctctttcaccacctggcgcagctgggtgtagatgtcctgccactcgcgcacgcgcagatagttaagaaaatcgacccggcactggcggcggaactgattcgacgacagcgccttctgctgctcgccgaggtagttccacagattgacgaaggcgaggaaatcggactctttatcgtggaagcggcgatgtttttcgtcagaggcctgctgtttgtccatcggccgctcgcgcgggtcctggatcgacagcgcggaggtgatgatcatcgcttcccgcacgcagccgtgcttctgcgcctccagcaccatccgcgccagacgcggatccaccggtagctggctgagctggcggcccagcggggttagtttataagccgttgcctgcgcatcggtggtgatggcgcccagctcttccagcaggcgtacgccgtcctggatattgcgcttatccggcgcttcgacaaacgggaaggcggcgatatcgcctaagcccagggcggtcatctgcaggatgaccgacgccaggttggtgcgcagaatctccgggtcggtaaattccgggcgcgacaggaaatcgtcttctgaataaagacgaatacagatcccttccgaaacgcggccgcagcggcccttacgctggttggcggacgcctgggaaaccggctcgatcggcaggcgctgcaccttggtgcggtagctgtaacggctgatacgcgcagtaccgggatcgataacgtacttaatgcccggcacggtcagcgaggtttccgccacgttggtcgccagcacgatgcgccgtccgctgtgcggctggaagacgcggttctgctcgctgttggacaggcgggcgtacagcggcagcacttcggtatggcgcagatccagcttattcagcgcatcggcggtatcgcgaatttcccgctcaccgctcataaagatcagaatatcgccgggcccttcgcgccccagttcgtcaaccgcatcaaagatcgcctgtaactgatcgcgctcggtatcgtccgcctcttccactatcggccgatagcgcacttccaccgggtaagtccgcccggagacttcgataatcggcgcattattgaaatgctttgagaaacgttccgggtcgatggtcgccgaggtaatgatgattttcaggtccgggcggcgcggcaggagctctttcagatagccgagcagaaagtcaatattcaggctgcgctcgtgcgcctcatcgataatgatggtgtcgtactgcatcaacagacgatcctgctggatctccgccagcaggataccgtcggtcattagcttaaccatggtgttttcgctgacgtggtcgctgaagcggactttatagccgatgcagccgcccggctcgctctgcagctcttcggcaatacgattggcgacggtccgcgccgccaggcgacgcggctgggtatggccgatgagtcctttcagcccgcgccccagctccatgcagattttgggcagctgggtggttttacccgaaccggtctccccggcgacgatcaccacctggtggtcgcgcaccgcctcgagaatctcttgttttttctggctaaccggcaggttttccggataggtgatggccggacgcgccgcttcgcgcagcaggactttaccggctgcctggcttatctccagcgccatctcctgcagaatggcctgttgcgattcaggatttttaaccttcttcacgccgtgcagacggcgggcaaagcgcgttttgtcgcgcagcatcaggccgtcgagctgttgataaagctgggggaaggtgattttttgttgttctgtcatagcgttatcgggcagagctctgccgggaaaatctcttttgaagtattgccttagagtaccacatctgtgtcattcgtgccttgttcaaaaaatctgaacataggattcgatatattgcgctatctctgtggcgcgattgtgaatacagtgtcaacaagcaccagggcattgacccgtcaatcacattaaaaaaaggaaacacccatgagcaaagtattagttctgaaatccagtattctggcagggtactcacaatctggtcagctttccgactattttgttgaacaatggcaggaaaaacaccctggcgatgagatcaccgtgcgtgacctggccgccaatccgatcccggttctggatggcgaactggttggcgccctgcgtccgagcgacgcgccgctgactccgcgtcagcaggaagcgctggccctttccgacgagctgatcgccgaactgaaaggcaacgatgtgattgttatcgctgcgccgatgtacaacttcaacatcccgacgcagctgaaaaactatttcgacctggtggctcgcgccggcgtcaccttccgctacaccgagaaagggccggaaggtctggtaaccggtaaacgcgcggtcgtcgttaccagccgcggcggtatccataaagatactccgaccgacctggtcaccccatacctgtccaccttcctcggcttcatcggcatcaccgacgtgaactttgtgttcgccgaaggtatcgcttacggcccggaagtcgcggccaaagcgcagtctgacgcgaaagcggccatcgacagcgtggttgcagcctaatatttcactcctctcgcttcctgcgggaggagagttttactttttctcgtagcgtaaataccccaccacgcctccgccgccatcttttggatgattcacgccgtcgttgacctccacgcaagggaaatcgaaaggcgaaacgccgtcaatgcaggccacattcacgccatactgctgtgggtttgatcgccgttgatgaaaggtgtagatcccgcataccgagcagaaaaagtgcacggcttcccctgtattaaagcgatactctgtgagcttatcccctccgcgtaccacctctattcctgaacgcggcgaagagaccgcgaccgccccacgcatgcgacaatatgagcagttacagcgccgaacggtgttgaagccgtcgctgagttccacggtaaacgccaccgcaccgcagtgacagtgagcggataatttctctgccataattttacccctcaggtggcggcttttggccgcaggttttcatcaaacgccagccgcttacgccctgcttcgacttcccgtaatggctccacctggtgcagcgtctgcttacagcgttccaccagcgcctggtattcacgggtaccttgttttttccacgccagctcctgttcgctcagggtgcgaatcgcttttgccgggctgccgataatcagatggttggcgggcatctcggcgttggctttgacaaaggccgaagcgccgacaatgctgttttcgccaatgaccgccccgtcgataatcaccgcactcatgcccaccagcgcgttgcggccaatcacgcagccgtgcagaatagcgccgtggccgatatggccctcctcttccaccaccgtatcctggccggggaagccatgcatcacgcagttatcctgaatattggcgccgtctttgaccacgatgcgcccgaagtcgccgcgcaggctggcgttgggcccaacatagacccctttgccgaggatcacgtcgccaatcaacaccgcggtcgggtgaacgtaactctcctccggcaccaccggcgtcagtccatcaatctgatatatcggcatgcaacctccttatgcgcccggcaaaccgccaaagcgctgataatagagcggacccggcgccgggagctcgcccaccgagctctcacctttctcgctgacgaacgccagcgcgccgggactcacgcgttgataaatattgatacacagctggcgggcggtttgccctgcccaatgcgccggcaggagctcttccggcagcagcgggtctttgagcaccacccggcgatagaaatggataaggagcagttggatctggaaacagcgatccggcgtcaactctgacgggtcgcagtcgcgcagcagcggcagtagaggtcggaacaaggcgataaacgcctcgtacatctcattttgttcggtgagatgccagcactcctccacccggctgcgcagggccgccctggagagcgccagcggcgaatgggcttcaaaacagatgacattttcggcgacgcccgcttcgtggagcagagactggacgtccgccagcttttgcgacggcgaggccagcaggctcggcgccagcgcgccaaacccctgccacagcagctgctttttaacgtcggcgagcacatttttctccaggccttccgaaagcagcaacagccaggtaccgtcccattccggggcactggcgcgataaattttatgctccgcgcgccgggtcaggcgcaaccctttatcactcaggcgatagaagctgcgccggccgatgcggacaacatcaagccactcttctttattgaggcgaaacagcgcggtgcgtacgaagcgctcgccgaagcctaatccttccagcagcgccgcgacgctgcccagccacacttccccaccgcgttgtaataaagcgtcgccatacagcgaggcaattaatgacgtgccgctgatgggcatcgccgtcaccgcttgttgaataaaggcgtcgagtttactcatctgattcattctgttgttatatttttcctttatgaatcatagcacaggaaactccccggctgacggcgcaaacgcttcagccgggtgcctgccgcgcagccacgcagccggagagaggattaaccgctaaccaccgcttttcgcaggtcgaatacccgacaggctttcccttccgagcgcggaatgctgccgcagttgacgatagtaatatcggtggagatcccgaccatcgacttaatgcggtgacgcaactgatggcaaatctggcagcgttgttcatgactcagcgccagcccgctctctttcagctcaacgcgcaccgccagcgaatccagatgaccgcggcgattgacctctaactgatagtgcggcgccaggtgttcaaacttgaggatctcctcttccagctgcgaggggaagacgttaaccccgcggataatcagcatatcgtcgctgcgtccgctgatgcgatccatgcggcgcatggtccgcgcggttcccggcagcaggcgcgtcagatcgcgggtacgatagcggatcaccggcagcgcttctttggtcagggtggtaaacagcagctcaccatgctcgccatcttccagcggcgtaccgtcgtccgggttgacgatttccgggaagaagtggtcttcccagatagtcgggccgtcaacggtttccagacactccatcgctacgcccggtcccatgacttccgacaaaccgtaaatatccagggcggtgatccccagccggcgctcgatttccgcgcgcatcgccagcgtccacggctcagcgccaaagacgccgacccgcaatgaacagccgcgggcatcgccgcccatctggcgctccagctcttcaatcagattcagacagtaggacggcgtcaccatgatcatatccggctggaaatcgcggatcagctgcgcctgtttttcggtctgtccgccggacatcgggatcaccgtcgcgcccaaacgttccgcgccgtagtgcgcgccaaggccgccggtaaacaggccgtagccgtaggcgacgtgaattttatcttttgctgaaccaccggccgcgcgcagcgaacgggcgacaatattggcccagttatcaatatcgttttgcgtatatcccaccaccgtcggtttgccggtggtgccggaagaggcgtgaatgcgcaccacctgctccatcggcaccgcgaaggtatcgaagggatagttgtcgcgcagatcctgtttggtggtgcaggggaatttttgcagatcgtttaattcccgaaagtcgtcagggtgcacgccggcggcgtcgaacttgcggcgatacatcggcacattttcgtacgcatgcttcagcgtccatttcaggcgctgggtttgcagggcctgcagttcgtcacgcgatgcggtttcaatcggatctaattttgtagtagttatcattgtagggtactcgcaggtaaattagctcacactcgctcgaggatcatggcaatgccctgacccacgccaatacacatcgtacacagcgcatagcgcccgccccggcgttgcagctcaaggctggcgctcagcgctaaccgcgcgccgctcatgcccagcggatggcctaacgcgatggcgccgccgttgggatttacgtgcgccgcatcgtccggcacgccgagctgtctgagcacccccagcgcctgggcggcgaaggcctcattcagctcaatcagatccatatcgttaatattgagtcccgcccgctccagcactttacgcaccgccggtaccggccccagtcccatcaggcgcggttcgacacccgccgtcgccatcgccacgatacgcgcccgcggcgtgagcccctggatagcggcctgctgttcgctggcgatgatcagcgccgcggcgccatcgttgacgcctgaagcattgcccgcagtaatgacgccgccctggcggaacggcgctttcagtttcgccagctgctcaagcgtggtttccgggcgcggatgctcgtcctcgcgcacgtcgctaaccgcccctttccggccgacaatctgcaccggcacaatctcctgcgccagaatgccgtcgcgctgggcctgcgccgtgcgctgctggctgcgccaggcgaaagcgtcctgatcggctcggctgatatttaacaattcagctacattctcggccgtttccggcatgctgtcagttccgaagtgttgcgccatgagcgggttcacaaaacgccagccaatcgtggtatcaaagagttccgcctgacgctggtacggcgcgctggcttttcccatcacgaaaggcgcacgcgacatcgattccacgccgccggcaatcagcagatcggcatcgccggctttgatcgccctggcggcaaagccgatggcatccagacccgatccgcacaggcggttaatcgtggtgcccggcacggtatgcgggtaaccggccaacaacgtcgccatgtgcgccacgttgcggttatcttccccggcctgattcgcacagccgaaaatcacatcatcaattgctgccgggtcgagcccgggattacgactcaggagctcacgcagcgggattgccgccaggtcgtcggcgcgcacactggccagcgcgccgccgtagcggccaatcggcgtacggatcccgtcacaaataaaggcgtcgcgcattacacgtctcccgtgattgtgccgccgatgcggtgcgatttgccgcggaacagggccacaatcttttgctgttgattaacaatttcgatgtcgtagacgccggtcagcttgccctgctgtttgactctggcggtggcgaccagccggtcgccggcaaacgccggacgaagaaaatcaatgcttgccgccgaggccaccgccgccagcccctggctgttacaggcgtaggcgaaagcggtatcggcaagcgtaaatagctgaccaccgtgacaggtttgatggccgttaagcatgtccgccgagacggtcatactcatctgcgcaaaaccgtcgtccatttcgataagttcgatccccatctttctggcgcaggtatctttttcgtacatcacgcgcgcgttgcgccacggatcattgctcatggtgcttctccatcagcgccttctggcgcagcagggaactggggcgatagcgctcctcgccataatggtgttgcaggttctccagcagttgcagcacccgccgccagccaaggcgttctccccatgccagcgggccatgcggatagttgacgccaaggcgcatcgcggtatcgacatcctgcgggctggcgacgcctttttgcaccgcatccagcgcttcgttaatcagcatcgccaccgtgcgccacaccagcaggccgggataatcggcaatacgcagcactttcttgccctgctgctggaagtaatgcacggccttatcagtggccgcaggcgcgttggttgccgctgcggccagcaccaccgtatcgctggcgcacaggtcatacaccaccaccgggcggtgatgcttaatactcagcgccagggcggtctcgccttcagtctccagcagcaagacatcgtctaattcagtgacattgtcacttctgacggtaacggattcagcacccatcattaccggcggcagcgccgcgtccggcagtgtctcagcgggccagcgatagacgccgtggccgctctttttacctagccgcccggccagcgccagctcttgctggaggagcgatggcaggtagcggcggtcctgccagaaggcgttaaacaccgaacaggtcacggcgaagttgacgtcctggccaatcaggtccgtcagcgccagcggtcccataggaaaaccgccgccgtcacgcaaagcggcatcgataacctccggggcggcgacctgctcttccagcgcccgccaggcctcagcgtagaacggacgcgctacgcggttaacgataaaaccgggcgttgagcggcagcgtaccggctgtttcccccagccgcttacgcactggcacagctgctccaccacttctgtggaggtcgcaagaccactcaccacctcgaccagcttcatcaccggcgccggattaaaaaagtgcagtccggccacccgctccgggtttttgaccccggcggcgatagcggtaatcgaaatagacgaggtattactggtcaacagcgttgacggcgcgcagatctccgccagctgcgtgaacagcgccgttttgacctccaaccgttcagaggccgcttcgatcactaaatccgcatcggcaagtgcggctaaatcgtgggccggatgcaggcgcgccagcagcgcatcggcctgctctgacgccagtttgccccgcgcaacgcgtgacgccagacgcccggcgataccctctatcgccaggtctacagccttagggttaatatcaaaaatacgcaccggatgcccggcggcggcagccacttcggcgatgccggcccccatggtgccgctgccgatcaccgccacgttgactaaggatgtcgtcatcatctatttcccgctgaactgtggtggccgtttggccagaaacgcgctgaccccttcgcggtaatcatcgctgcgcccggccagacgctgataatcgcgctccaggtccagctgcgcgtcgagactgttggtttcagaagccagcagcgcctttttaatcagcccaagaccaaacgtcggttgcgccgcaagatggcgcgccagttgcagactggtatccgccagttctgaatcgtccaccagttgccagataatcccccactgcgcggcctgttccgcgctgaggctgtcgcccagcagcgccagccccatcgcgcgcgcacggccggccacccgcggcaggaaccagctgccgccgcagtccggcaccaggccgagcttgctgaacgccatcacaaatttggccgaacgcgcggccagcacgatatcgcaacccagcgccagggtagcgcccgcgccggcggccacgccgttaaccgcgcagatgaccggtttcggcagcgccgccagacggcgtaccagcgggttgtaaaagcgttctaccgacatgccgagatccggcggcgggccgctggggtcgacattgcggtcgttcaaatcctggccggcgcaaaaaccgcggccggcgccggtgatcagcaggcagcgcacgccatcatcgcgctcggcctgcttcagacattccgccagctggtgatgcatcaggtcgttaaaactgttaaggcggtccgggcgattgagggtaatggtcatgacgccctgttccactgcgctgagaatgaaagcttccacgattagcgtcctttaaattccggggtacgtttttgtaagaaggcgtcgatgccttcgcggcggtcctcggtggcgctcagcaggctaaacagctggcgctcctgttgcagaccggcctgcaggctgacttcctgcgccaggcgcagcgactgttttgccgcccgtagcgccagcggcgaatggcgggcaatggtggttgccagtttcagggcatactcatcggttaacgccgccggatggatatcactgaccagcccggcctgctgcgcctggcgggcgtcaatactctcgccgctcagcaccatccggctggccagcgccttgccaacgctgcggatcagccgctgggtgccgcccgcgcccggcattatgccgagggtaatttccggcaggccaaagcgggcgttgtccccggcgacaatcaggtcgcacagcagggccagctcgcagccggcgccgagggcgtagccgttgaccgaagcgatgagcggtttagtaaaggcatcaattcgcccccataaccgtgggcgaatatcatccagggtggcaggaagatctttttccgccatttcattgaggtcagccccggcggcgaaaaaacgcgcgttaccgcgaataacgcagacgccgacgctgtcatcaactgccgccgcctccagcgcctcggcaatctgggttaataaggcattgttcagcgcgttgcgggcctgcgggcggttcagcgttagctgtagcacccggccatgacggtggatcagcaggtcactcatgccatcccccgcgcgtcaaagtcgaccactacatcgccgctggtcggcaatgactggcagctcagcacgtagcccgccgccagctcatccgcttccaggctgtaattggcggccatcgccacttcaccgcgtagcactttgcatttacaggtggcgcataccccgcccttacaggcgaacggcagatcggcgccctgacgcaatgcggcatccaggatgctgtcgtcttcggcgctgagggcgataagccgatcgcgcccgtcctggcggatggtcaccgtgcgcccttccgcctgcactccagcgacccgcttcacattgccgcctggggtattaaagcgttcgagatgaatcgatttctccgctacgccaagttcacgtaacgtcgcttccgcctcgtccatcatcgccgccggaccgcagataaaggcctcgtcgaaacggctgaaatccagcagatggtcagcgagctggcgcagtttgtcgccgtcaatgcgcccctgtagcagatcgctgtccatcgactcctggctaaacaggtggatcacctgcaggcgctgcggatagcggtcttttaaatcggccagcgcctggcggaacatcatgctatggctgctgcggttgccgtagatcagcgtaaagcggctttgcggctcggtcgctagcgtcgcgctaatgatcgccatcatcggcgtgatcccggagccggcggcaatcgccagatattctccctgccgttcggcctgcggttgataaccgaaatgcccctgcggcaccatcacctccagctccataccctgctggatatcgtgctgggcgtagcgcgagaagcgtccgccgtcgatggctttgaccgcgacgctaatttcgcctggcgtgcggctgcgacaaatggagtaacagcggcgcagttcttcgccgcccagacgggcttttagcgtcagatgctggcccgggcgaaaacagtattccgcctgcagggcttgcgggatcgcaaaagtgatggtcaccgcatcgcgggtttccggctcgactctcgccaccttaagcgaatggaacgtcgtcatggcaacctcaaatacatttaaagtaatcaaaaggttcccggcagctgtcgcagcgatagagcgctttgcaggccgtggaaccgaattcgctaatcagcgaggtatgggtgctgccgcagcgcggacagctcacctcagcaggcatatccgcatggcaggcgtgcacctggggcgggctgatgccgtactggcgcaggcgctcgcgggcatcctgactcatccagtcggtggtccacggcggatccagctgcaggacgatatgtaccggctgaaagccatgctcgttcatgaccgtgcggatctcccccagcagatgctccgtcgccggacagcccgaataggtcggggtaaagccaatcacccagccgtcgccgtggcgcgcgacgctgcgcaccataccaaggtcggtgatggtgagtactggcacttccggatccgggatcgcgcttaataatccccagatggtgcgaacctctgcaggagcgatatcggcaagacgttgcatagtcacctcacttaccactgcagtccgggatgcgaacgctgcagatactgcatctccgccagcagcgggccgagatgttcactgtgcagcccctgtttgccgccgctgcggaaggccgcttcctgcgggatctgtaagccggagtcgagaagcgccgtgtgtaccgcgctttgccattcggcctgcagttcacgcggatcaaccgcaatgccctgctcaaccaggctgagctccacttcatcagccaggaacagttcgccggtgaagcgccacagattgtcgaccgcttgctgcattttgcgatttgataactcggtgccgttaccgagacgctccagccagccgcggctaaagcgctggtggtaacgcacctctttcagccctttagcggcaatggccgccagctgcgcgtcgcggctgttcaccagccggctgaacagggcgacatgccagacgtcgataaagaactggcgggcgatagtgtcggcaaaattgccgtttggctgctccaccagcagcaggttgctgaaccggcgctcatcgcggccaaaagccagcgtatcttcatcgccgcaaccgttaagctcggcggcatagcttaaaaaattgcgcgcctggccgagcaggtcgaggccgatattggccagcgcaagatcgatctcgagctcgggagcatgtccgcaccaggcgcctaaacgctgggccagaaccagaccattgtcgccaagccgcagggcgtaggtggctacggggttagggttattcatcgccgcctcacatatgttccatgccgtccggcacggtatagaaagtcggatgacggtagactttgctttccgccgggtcgaagaattcgccgcgatcttccggctgcgaagcaacgatttcgctggccttcaccacccaaattgagcagccttcgctgcggcgggtgtaggcatcgcgggcattctccagcgccatttgatcatcggcagcgtgcagactgccgacgtgacgatgggataacccctgtttgctgcgaacgaacacttcatataacggccagtaaactttgctcatgttgtctctcctcatgccgcgctgcgggcctgctgtttttgcgcatgggccagcgcggcttcgcgcacccattcgccctcttcccaggccttacgcttggcggccaaccgctcgtgattgcaaatgccacggccgctaatcacctcgttaaattcctgccagtcgatttcgccgaagcggtagtggccgctggcttcatcaaactgcaaatccgggtccgggacagtcataccgaggatctctacctgcggcacggtattgtcgacgaagcgctgacgtagctcgtcgttggagtgaagtttgattttccacgccatgctgcgggcgctgttcggcgagttgtcatcgttagggccaaacatcatcagcgccggccaccagaagcggttaatggcgtcctgcagcatctgccgctgcgcctcattgccctgcgccagcgccatgcaggcttcaaaaccctgacgctggtgaaagctctcttctttgcagattttgaccatcgcccgggcataggggccgtaggaggtccggcacagcgccacctggttgacgatggccgcgccatcgaccagccagccgatcacgccgatatccgcccagctgagggtcgggtagttaaaaatggaggagtatttcatctgcccgtcgagcatcttctgatacaggtcttcccgggcgcagccaagggtttccgcggcgctatagagatacagcccgtgtccagcctcatcctgtaccttagccaacaggatcgctttgcggcgcagcgtcggcgcgcgggtgatccagttgccttccggcagcatgccgacgatctccgagtgcgcgtgctggcctatctgccgaatcaaggtcttacggtaggcatccggcatccagtcctgcggttcgatggccgtttcctgcgcgatgcgctggtcaaagcgttgttcttctgtcacgtcatcacctttatgattccgatattcacaacaaaaacatttatgtgaatcactttgtttattgaaggttacatattggttaaataaaaccacaaattttgtttgctctttttgtgataatctccgcaaaaccttttgtaaaccacaattaatacagtaagttaagcataagacgtaacgccatcgcgatcacaatgttaataatttattaaatacgggcttgcattttatgattcataaaagaactatttatagatatcacacgtaacacatttggagatttgcgatgcagcagttagccagctacttatccggcgcctggcagaccggccggggccgcgcccgtactatccatcacgccatcaccggcgcggcgctttgggaggtgaccagtgaaggcctggatatggcgcaggcgcgccgcttcgcgattgagcgcggtggtaaagccctgcaggcgatgacctttattgaacgcagcgcgatgctgaaagcggtggcgaaacacctgctggagcagaaagaccagttctacgccatctccgcgcaaaccggcgccactcgcgccgacagttgggtggatattgaaggcggtatcggtacccttttcacctatgccgggctcggtagtcgagaattaccggacgatatcctgtggccggaagacgagctcatcccgctctccaaacagggcggttttgccgcgcgtcatgtgctgacatcaaaatcaggcgtcgccgtccatatcaacgccttcaacttcccctgctggggaatgctggaaaaactggcgcccacgtggcttgccggtatgccggctatcattaaaccggcaactgctaccgcccagctcacccaggcaatggtgaaagcgattgtcgacagcggcctggtgccggagggcgccatcagcctgatttgcggcggcgcgggcgatctgctcgaccacctcgatagccaggacgtggttacctttaccgggtcagccgccaccggccagcagctacgggcgcaccctaacctggtagccaaatccattccctttaccatggaagcagattcactcaactgctgcgtgttaggcgaagacgtcactccggagcaaccggaattcgcgctgtttattcgggaagtggtccgcgagatgacggcgaaagccgggcaaaaatgtaccgctatccgcagaatcattgtgccactggctcagattaatgcggttagcgatgcactgatctcccgcctgcataaagtaaccgtcggtgaccctgcgcaggagggcgttaagatgggggccctggttaatagcgaacagcgtcaggacgtacaggagagcgtcaataagctgatagccgctggctgcgaagtactgctcggtggagaggcggacctcagcgcggccggcgcatttttcccgccgaccctgttgtactgctcacagccggatgaaacgccggcggttcacgccattgaagcttttggtccggtggcgacgctgatgccgtatcgcgaccgccagcatgcgctgacgctggcgcgcgccggcggcggcagtctggcggggacgctggtcaccgccagcggcgagctggcgcgtgagtttatcctcggcgccgcccgcgcccatggccgtattcagatactgaatgaagcatcctccgcagaatcaaccggccacggttcgccgttgccgcagctggtgcacggcggccccggccgcgctggcggcggagaagagcttggcgggctgcgttcggtgaaacactatatgcagcgtaccgcggtccagggcagcccaacgatgctggcgaccatcggtcaacagtgggtgcgcggcgcccaggtgaacgaagaccgtattcacccgttccgcaaatatttcgaagagattcagcctggcgacagcttattaaccccgcgccgaaccctgaccgaagcggatatcgttaacttcgcctgcctgagcggcgatcatttctacgcgcatatggacaaaatcgccgccgccgagtcgatttttggcgagcgggtggtccacggctatttcctgatctccgccgcggccgggctgttcgtcgatgccggcgtcgggccggttatcgccaactatgggatggaaaacctgcgctttattgagccggtcaaaccgggcgacaccattcaggttcgcctcacctgtaagcggaaaacggtcaaacgtcagcgcagcgccgatgagaaagccaccggcgtggtggaatgggcggtggagattttcaaccagcaccagcaggcggtggcgctgtattccattctgaccctggtggcgcgtcaacagggagatttcccggcgtgatagcgaaaaatagaccgctggcgctctgttggccgaccctttagccattgatactgcaatcggtttgcaacggtttcgccccgggaagtcctttatgttatccgtggcttcagcgcacattgcgctcccggttaatcgtctgcgttatgcctggcatagcgcagggagcgcacagggggcggccagtcgccgccgccccctgtacccccgggctcgggccagcaagaatggtgaataaattaacggcaggccgcacggaccgtaggccgggtaaggcgtcagccgccacccggcaaaaaaatcagcgcacgtactcaatgcctctgcggaggcattttttacgcccgtctggcaaaactgacaaacaagctggcaaaagcaaacaaacgccccggcgccgctggctggtagcttaaggatgacaaagccgacattcgcagcggcaagagacaacacaacaataagatgaggtcacaatggcaaacggcttgaaattttctcctcgtaaaaccgcgctggcgctggccgtggcggtggtttgcgcctggcaatccccggtcttcgctcacggtagcgaagcccacatggtaccgctggataaaacgctgcaggaattcggcgccgatgtgcagtgggatgactacgcgcaaatgttcaccctgataaaagacggcgcttacgtcaaagtaaagcccggcgccaaaacggcgatcgtcaacggtaaatcccttgacctacaggtgcctgtggtaatgaaggaaggtaaagcctgggtttccgatacctttatcaacgatgtcttccagtccggtctcgatcagaccttccaggtggaaaagcgcccgcacccgttaaactcgctctcggcggcggaaatcagtgaagcggtgaccattgtcaaagccgcgccggagtttcagccgaatacccgctttactgagatttccttacacgagccggacaaggcggcggtatgggcctttgccctgcagggaacgccggtcgatgctccccgcactgccgatgtggtgatgctcgatggcaaacacgtcattgaagccgtggtcgatctgcaaaacaaaaaaatcctctcctggacgccgatcaaaggcgcccacgggatggtgctgctcgatgattttgtcagcgtgcagaacatcatcaataccagcagcgaattcgctgaggtgctgaaaaagcacggtattaccgatcctggcaaagtggtcaccaccccgctcaccgttggcttttttgatggcaaagatggcctgcagcaggatgcgcgtctgctgaaggtggtcagttatctggataccggcgacggcaactactgggcgcacccgattgaaaacctggtggcggtggtcgaccttgaagcgaagaaaatcatcaaaatcgaagaaggtccggtgatcccggtcccaatggagccccgtccgtatgatggtcgcgaccgcaacgccccggcggtgaaaccgctggagataaccgaaccggaaggcaaaaactacacgatcaccggcgataccattcactggcagaactgggattttcatctgcgcctgaactcgcgcgtcgggccaatcctctcaacggtgacttacaacgataacggcacaaaacgccaggtgatgtatgaaggttccctgggcgggatgatcgtcccctacggcgacccggacgtcggctggtatttcaaagcctacctcgactccggcgattatggcatgggcaccctgacctcgccgattgtacgcggtaaagatgcgccgtcaaatgcggtactgctggacgaaactatcgccgattacaccggcaaaccaaccactattccaggcgcggtggccatattcgaacgctatgccgggcctgagtataagcacctggagatgggcaaacccaacgtcagcaccgaacgccgggaactggtggtacgctggatcagcaccgtcggcaactacgactatatctttgactgggtgttccacgacaacggcaccatcggtatcgatgccggcgccaccggcattgaagcggtgaaaggcgtgctggcgaagaccatgcatgaccccagcgccaaagaggatacccgctacggaacgttgatcgaccataatattgtcggcaccactcaccagcacatctataacttccgcctcgacctcgatgtggacggcgagaacaacaccctggtggcgatggatcctgaagtgaagcccaacaccgccggcggcccgcgcaccagcaccatgcaggtgaatcagtacacaatcgatagcgagcagaaagcggcgcagaaattcgacccgggcactatccgcctgctgagcaacaccagcaaagagaaccgcatgggcaacccggtctcataccagattatcccttacgccggcggcacgcacccggcggcgaccggcgccaaattcgccccggacgagtggatatatcatcgcctgagttttatggataaacagctgtgggtgacgcgctaccacccgacagagcgatatccggaagggaaatacccgaaccgttccgcccacgataccggcctgggccagtacgcgaaggatgatgagtcgctgactaaccacgatgacgtcgtgtggatcaccaccggcaccacccacgtggcgcgcgccgaagagtggccgatcatgccgaccgagtgggcgcacgcgctgctcaagccgtggaacttctttgacgaaacccctactctgggcgaaaagaaaaagtaatcttaaccagcggtgaaatccagcaggatcttaccgcctcttcccggctggccggcggcggcaatcgccgcccgccagtcgttcaacgctatacgctgggccggcggctgggaggtcgttggcaggcgctgccagatttcgtcgaacgctgcccgccacgccgccacgctgagtgtcggcagcgcctcccgcagatgaaacttgcgcaccgtcgcgctaccgcgcgtctgggtcagcggccgcccggataacagcccataggagatgagggtcgacgacccgggcagcaccgacagcagcgtattcgccagttcgccgcccaccgcgtcaaacaccagatcgctgtgctggctgaccttctccatcagcgcccggtcggtatcgcggatcggatagatcccggcctgttccaggcgcgcccgatgctgcggcgagcgaataatcccgctcaccgagcgggcgcccatcgccagcgcccactgccccagcagactggcgcaggaggacgatgccgcggtcagcacgaggtgttttccggcaaccggccagcgcttgagcatcagcatcgccgtcagcggattgatatacccgcgggcggccagcagatcgtcaactgccggcggcaccggcaccagccaggtctcatccagatcgataaaccgctgccaggtgccgcccccgcgcaggggcagcacccgctggcccgcggctaaccggctgccgtatggcgcggcgaccacctcgccaaggccttcatagccggcgacggccggcagtcgggtgcggtggcgataggcgccggtcacggggatcagatccgaaggattcaccggggcaaagcgcatcctgacccgcacccgtccgcccgccagcggcgccagcggcaggcgtttcagggtcagcacggcggccggcggcccgtagcggtcataaacaatggcgtcgttgaacatcgactggctccagacaacgaaagtcgggatcatagcagatcccgcttccagtggctcacacccgcggccaaacctgggggaacagcggggaatccagcgggtcgccgtcccgcagggtcagctcggggaacggtggcgacgtcacgccgccgcgatcggcaaacgaggcgtcatcccccacccagcgggcggagaagacccgtcgcgcccgcgcgccggggttgccgcgggcgccatggacggtgcgaaaatggaaggccaccgcatcccccggctccagcgcccagctgacgatatcgtattcgtcctcatgggcgtcgatatccggcagggtgctgaaccgggtgtgctcgtaaagcttagtgccattgaaacgggtaggactgaactcctcctcccagcgatgcgacccgcgaatgcagcgcagcgaggtcgcctccgccaccgggtccagcgggatccagaagctgacgttctgcctgccggagacgcaatagtaaggctggtcatgatgccagggagtcaccgtgctgcctccggccggtttgaccagcgtatgttcatggaaaaatttcgccgtctgcgactgcatcagcgccgccgcgatctcggcggccgctgactgaaagacaaactcgctaaacgccgggatccgcgaccagttgcagtagtcctgaaaaaaaggcggcgaaccatctttggggatcaccgtgcgcgcatgaccatactcgctggggctggccatcagcgccgtgaccccttcggcgaggcgctcgacccagggggtaaagacgccttttaataacaccgcgccatccgcctgccagcggtcgatggtcgcttgatcgatgtggggagagtgttgattgtgcatcgcttgggttcctgtgttgagggatcaggtgagcggttccgccggttcggcacgcatccacgcgcaaagctgtctcagcatcgtcatacagcgctcggtctgcgcgatgctgatgtactcatcggccttatggccctgggccatgctgcccggtccgcagaccagggtcgcgacgcccatctcatcgaacagccctccttcggtgccgaacgccacggtggagaagcggtcgctgccgcaccactgcgccagccagcgggcgaagtcggactgcggatcgctgagcagcggcggatagtggcttaacagctggaactggatgtcgctcccgctgcctacccggcgcatctccggcagcagctggcgatgggcgtaggccgccagcgcctcggtgaccgcttcgggacgcatccccggcaggtagcggatctcaaaatcaaagcggcaggactgcggaacaatgttcagcgcggccccaccctgaatggtgcccacctgcagcgtgctgaagggcggcgaaaagcggctgtcctgctgccgggccagacgcacgcccagccgatccaggtggttgatcagtctcgccgcgtagcggatggcgttcaccccctgcggggcataggccgaatggcaggcttgcccctcgatgcagcagcgcatggccagtttgcctttatgaccgaacaccggctgcatctccgttggctcgccgatgaggcacagcgccggtttctccggcgaggcctgcagaaaatccaccaggctgcgcacgccgagacagccgacctcttcgtcataggagaaggccagatgcagtggcatgcgcagcggcgccgccagaaagtcatccactgccgccagcacgcaggcgagaaaccccttcatatcggcgctgccgcggccatagtagcggccatcgcgctcggtcaggctgaaaggcggaacgctccaggcctggccgtccaccgggaccacgtcggtgtggcccgagagcatcaccccaccgccgccggacggccccagccgggcgtagagattggccttaccgcccgacgggtcataaaagcggcgggacgccacgccgcgggcagcgagaaaatcggcgatccagtcgatcatcgccaggttcgaatggcggctggtggtgtcaaaagccagcagcgcggcgaggatgttattcatcgccggggacgccataggcgggcgcctcgcgcgggtcgagcgcccgggtaatataggcgtccatttgcggctcccaggccagccacagctgctcaagggccgccagcggatccacctccgcccagtcaatgcgcaggtcgaccaccggccacgggtaatcgtccaccaccttcaccgccgccgagtggaccggcccggcctcgcccccggcgacgatcccggcgcgcagcccggccagcagccggctggccagctctccggtggcggcctcaaaggcgcccaccatcgcggcgattaccccctgaccggccagcatgttacccgccgccacgcagttatcccccgccagggcgccgccgatcccgagggtgaactccccgctgaacaccgccgtgtcgccgttggcgtcaatcgccgcgacctggcgatattcgcggaagcgatcctccgccagggccaggttcagggcctgctcaacgctggcccccgcttcgagcgcgctgaggatctgcggccccagcgacggcagggttatgttctgactggcgaccgcgccgacgccgggcaatagccacggacagcgcgatcccacggccatgctcgacgaactaatggcaatgccgagctgacctgattccgggcagcgggcgctaatagagagagtcattctgctgcctccccctgccagtcgtcagggatcaccgccgtaacgtcaatctccatcagccactgcggctgcgcgagggccgacaccaccaccccggtggagatgggaaagacaccttttaaccatttgcccacctcctgatagaccggctcgcgatagcggggatcgatcagataagtggtggtcttgacgatatgcgagaggtcgcttcccgcctctttcagcaactgttcaacattcttcattgcctgctccgcctgcgcccgcgggtcgccgaggccaatcagattgccggcgaagtcggtgccaacctggccgcgaacgtagacggtattgccggcccgcaccgcctggcacagatcgttgttcagcgcctggttcgggtaggtctctttggtgttaaacatgcgaatacgggtatgagttggcatcaaagcactccttaaggaaaacggttaacaggacggctggtaacgctggtactggcgctgaatggcgatctggtcggcaatatatttggcatcgtgccagacgccccagataaaggtggacccgcgccgcgagagccacggcaagccgaggaaatagacgcccggctccgtcgatacgccgcggtgatgctgtggccgctgtgcgtcatcgaaggcgttgaccttcagccagcgatagtcagtggtgtagcccgtcgcccagatgatggtgccgatcccggcctcggccagattgagactgagcagcgggtcggtaacgcaggccggatcgggcagaaattcgcgggcggagggctcttcgggcaggtccatgccgttgcgggccacccacgcgtccgcggcgtcgagcagcgcaaggtaggaggcatcgccgcggcggatattctccgccaggtcggggtgaaacagtgctttgtcaccgtcaaagccgcgggtctgccccactaacgtgaccccctgatgcgccagctggcgaaaatcgacggtatggccgccgcgcgcgccgctcaccgcgatagtgacatgctctttacccggcgcattggccgcggcatcccacattcccagcaccccgagccaccagcaaaaatcgcgctgacgatagcgacgcggcgggcggtcgtgcgctcccaccgacagccacaccgcgcgtccggctcgctgtagctcatcggcaatctgcacgccggaggatcctgcgccaatcaccagcacaccgccctccggtagctgctgcgggttaaaatagtgcgcggagtggagctgctgaatagcctgactctgtggggcgatggccgggatcactggccgctgaaacggcccggtggccgctacgatccgctgcgcttcaatccccccctgcgaggtgtcaatacgaaagcccggccgtccgacgaggcgttcggcgctgaaaacctccaccccggtacggatcggcgcattgaagctgcgggcataggcggcaaaatagtctgccacctgctctttgccgacaaagctgtctgccgggcagtccgggaacaccatccccgggaaccgatcgtgccaggccgggccgttggcgaccagcgaatcccagcgtccgctgcgccaggcctgggcaataccctgcttttccagcaccaggtgggggatatccagccgggtcagatgctcgctcatggcgacgcccgcctgccccgcgcccaccaccagggtatcgatctcggtaatctgttcagtcatttcgctatccttcaagcacagttgccgacgacgtcgccggaattgacggctttcaggttatttaactgtgacgaattggtaaaatattataaaacgatcgactgaatagaattttgcgaggctgagtgacgacaaaaaataatgcctgccggatcgacaggcgttatttcaggcgtgagttggggttaattcgatgctgcgacaataatccataaacagttgcgtcggccgcgtgggctcattattcgcgagatgcgccataattaaggtcgaggcgggcatctcgtcggcaatatcccgctgcaccactctttcaccatcgtaggtcatgtcgcagcagggccgggtgaccagtaccgaaaaacccaacccctgacccaccatacagcgcaccatttcaatggagggggaactgtaagccacttccgggtgataacccttttccttaaagatggagataaaataatttttactggggaccgcatcgaggaggatcatcggctcacggctcagctcctgcagcgtcacctgcgccttctgcgccagcggatgcgcggcgggcagcagcgcgtagggtttatgcggggcattgagccgttctttattgatcgaatggccgagctccagatcgtagaccagcgccaggtcgaagcggccgcggtgcaggccatgcatcagctcatgctgttcgccgtcgtacagatgcagggtgatttccggatagcatttcttaaacccggccaccagcttcggcatatacagcggggccaccgattcaaagcaaccgatggagatcatgccagaaaccagctctttatccgctcgcgaattctgttcgaactcccaggacaggcgcagcagctctttcgctttatcgtagatccgccgaccgctggaggtgagcgaaacgccctgggcgtggtggcgaataaacagctgctggtcgaaggtgctctccagattcttgatggcaatcgaaatcgacggctgcgcaatgtgcagctggcgggaggcctcggcgatactctccgtctccaccacggtgacgaaatatttgagctgcttcagggtaaatcggttcatagcatcaccattgataaaatatggtccggcgcacgtggggaatagttttcctctaagtcccaagcaatccgcgtgccacccccggaaaagagcggcgcgttgcccgacaaggggcggcaatatttattattgctctacgcccgcgtggtttatttccgccgttgcaccatcatgcgccacgctgcacgccagacaggcagcagctgccccagtttcgcgcaaaatacccttcccccacaaaatagcgttattgaattactgtcattgtttttaaattgtttacacaaagtatctcagcaatcactttaaattccatatcgttaatatcgctgtatagtttttttaaacttaaaggccaaaaatttactaattgcctctgaaagcatcctgccagcatagtgtattcgcacgatgaataccggtggctccccattacggcacagccgagccactttaatttttgataattatgacgagtgaaatagcccatgacgtttaactggaactacatgttaagcctgctcagcgatgccgatttttggtgggccacctggaccgtcattaaattaagtctgctgacctggggctgcagtattgtgctcggatttattctggcgctggccaaacagtcgccgcgcggctggttatccaccccagcccggctgtatatctggttatttcgcagtatgccgctgctggtcctgctgatttttgtctacaacatgccgcaggcgctgccctccttcgccccggtgctgaacgatcccttctgggccggcctgctggcgatggttctcagcgaagcggcttatatcgccgagatccaccgcggcggattgctctccatccctcgcgggcagagcgaagccgcgcgggccctggggttgcgctacgcagggatccagtggcgggtgatcatcccccaggcgctgcgcgtcgccctgccggcgctggccaatgaatatatcgccatcgtgaagctcagttcgctggtgtcggtgatctccctgaccgaaatattgatggtcggccagcagctctactcgcagaactttctggtcatggagacgatgacggccgtggcgttttattacatctttatcgtcacggtgttcgattttctgctgaaacggctggagaactaccttgacgtaacccagcgcaataccgctcgtccggtagatgccgagatgcagcggctggccagcgcccgccgcccggcgatggcgcgcagcgtcacccagagtcatgagccggcactgcaggcctctaagctgcataaggcctacaacaacgtcgaagtgctgggggcggtgagcctgcagatccagcccggcgaggtggtctcggtcatcggtccgtcaggctcggggaaaaccaccctcattcgcctgctgaacggtcttgagcagatcgataacggcgaaattcagattaacggccaaccctttattcacctcgaccgccaggggcagcagaagccgcgctttatggagaatgccgaacatcgcctgaacatcggcatggtgttccagagctttaacctgttcccgcatctgaccgtgttcggcaatctgctgctggccccgcgctatcaccatctggcaagtgacgcggagctgcgccagcacgcctgcgaactgctgcacaaagtgggcatgctggagcacgcctggaagtatccacaccagctctccggcggacagcagcagcgggtggcgatcgcccgcgccctgatgatgcgtccgcagatcatgctgttcgatgagcccacctcggcgctggatccggaaaaagtgaatgaagtgctgcaggttatcgaatccctggcccacgaaggcatcaccatggtcatcgtcacccacgagatgaacttcgccttcaaagtgtccgaccggatcgtgtttatggagaaaggccgggtggtgtgcgatgacacgccgcaggcgatgcgtagcgggcagcacccgcgggtcgaggcctttctcaaagatgtttctctggcttaactatcggaacgtgaagaggaaaaactatgattgcgcagtggcaaattgatcagtttcatcagcagggttttctggtggtcgaagaagtgctttccagcgctgacatcgccgccctgcagagcgatttcgacggctgggtcgaggagagccgcggtcacgcgacggtgtggggagaaaccctcgacgggcggccacgtttcgatatcgaacgcgaccatgctcccgaccatccgtcgctgcgccgggtcgcctcaccgacggagatctccgaggcctatcgccatactgcgctgaattcgcggatggctaccatcgccgcgcagttgatcggcggcagcggcacccgctttcatcacagcaaaattaactccaagctgccgcacaccgccaccgaggtgaaatggcatcaggatttcatcttcaccccacacagcaatgacgacatcatcaccgctctgctgatggtcagcgaggtgacgccggagaatggcccgctcaacgtggtgccgggcagccatcaggggccgctgtggacccactggcaggaggggcgcttcacgggggcggtggatgatgaggtggtggcgacgcactgccagcagccgcaggcctgttttggcccggcgggctcggtctgctttatgcatacccgcctgctgcacgcctccagccccaacgagaccgccctgccgcgcaccctgttcatcagcgtctacgccgccgaggatgcgctgcccttcggcgaaaacccgctgccgagccgccatgccggccagctggtggccggggaagagagcggtctggtgcgcagcaccaataaccagcttcgtctgccgcagaagccgcacggcgcttcgttttttgttcagcaggccggcgccgatcgcgccagcatgtaattcgcccacactccggaggttttatgacacgcattttcgcaccacgcccgctgaccctgctgctctgcgcagcggctgctctgacatccctgaacgcgctggccttccagcaaagcggtaagatcaccgctggttcggacatgacctttttcccttacgagtacatggagaacaataagccggcggggtttgatattgaactgctcaacggcctggcgaagagcatgggccgtgaagcagtgaatatcgatacccgcttccccaacctgatccccgggctgcagggcgggcgcttcgatatcaccaactcgtcgatgtacattaccgccgagcgcctgaaggtgatcgacatggtgccgtacctgaaaagcggggaggcgatcctcgcccgcaaagggagcgactaccagcctaagacgccggaagacttctgcgggcataaaatcggctcgatgggcgccacctcgtggctggcgcagttgcagaagctttccgccgactactgcgtgaagaaagggctgaagccaattgcgctgagcgtttataccaccgacccgcagaccacccaggcgctgttgtcgcgcgcggtggatgcgcagatcaccgacgccgccgtggcgcgcggggtggtggaaaaactgggtgatcgggtggttatctcctctgacacgctgatctatccggtgctgaacggctttggcgttaaaaaaggcaatactaaggtgaaaaccgccctcgaagaggcgctgaaaaaatacagcgcgacgccggaatatgccgccctgctgaagaaatatcacttccaggcgccgacggcggacgatctgcagaccctgatgccgaaagcggaataatgcccatgcgcgattccgatgaagagcagatccgcatcgacctggcggccacctttcgcatcattgcccatctcggcatgcatgaggcggtggccaaccatttcagcgccgcgctctccgctgacgggaaaacgtttttactcaacccgaagtggaaacacttttcgcgcatccgcgccagcgatctgctggtgctgaacgccgatgatgaacgttgcgccgcgcgccctgacgtcgatgccaccgcgtgggccatccacgggcagatccatcagcgactgcccgacgtgcgggtggtgctgcatctgcacccggtgtacaccaccagcctcgcctgtctggcgacgccgcagatcctgcctatcgaccagaacacggcccgctattttaaccgggtcgccgtcgataccctgtacggcgggatggcggacaccgcggcagaaggcgcccggctggcggggctgctggcggataaacgccgtctgctgatgggcaaccatggggtgctggtgaccgccccgaccatcggcgaagcgttcgacgatatctggaccctggagcgcgcctgtcagatcctgatcaccgcctggtcaaccggccagccgctgaaggtgctgtcagacgcggtggcggaaaaaaccgcccaggactgggagaagattgccgatttctccaggcagcactttgccgagatgaagcagttgatgatcgacctcgatccctccctggtggactaaccccgcgccagcccgggtcagcccgggccgtcgctggccgccgccagcagcggcacgatgatatcgctgagcggcgtcggaatgccgtgctgacgcccgcgacgctgcaccacgccgttacgaatatcccactccagcggtcggccattgaggcgatcgatcagaatagaggtgcttaagtcggcaggcgcccgatgaaagccggcgataatctcctccggcacgttgtcgctcagggcggccccttccgcccgcgccacctgcaggcattcgcgcagataagccagcccgagggcagtgatgtcctcccgggcgaacatcccggcgcgtcgttcggtcagcaccatcagaccggcaaccgcgttctgcaacagtttgcgccaggcaacggtggtaaaatcagccgccaggtccaccgcgcagcgggttcccgccagcgcctgctgcacccgctctgcccccggcagatccggcagcgtcaggcgcggcgtggcgcgcaaccagacagaggcatcggcatcgcgctgcgccgggaaccagaccaccgacggcagcaccgtcgcgccgccggtcaagggggcaaactgctggcgctgctcaacgccgttttgcagcacgcacaccacggtgtcaggggaacacagggccgtcagccagggggcgatggcctccgtctgggtggttttcaccgcgacaaagaccaggtcgaagggggcggctatcgccatcgggtcggtgtgcaccgggccgggcaccacgatctcaccctcgtcagtgcgcagcaccagcgccgaatgggcggtacgcccgcagaccatcggcgccctccccctctcaaacagggcggcggcaatcgtggtgccgatggcgccgggaccaattagcgcaaccttaggaaatgctgtcatgccgaagacctcctgatgattcaccgcccagattaggcaaagattgccctccacagtagcgagaaagaccggaagtcggcaaggggcgcgtcgggaaaagcctttcgccttccccgacggagggctagtagcgcacgcagacggatttggtttcgcaccagccgtcgagccagtcagggccgaaatcgcggccggttccagactgcttcatgccgccgaaaggcaggttggcgtcaatcagggtatggctgttgacccataccgttcccgcctgcagacggtcggtgtagttcagggcctgggtcagatcgcgggtccagacgctggcggtcagaccaaaatcgctgtcgttggccaggcgcagcgcctcctcgccatcggccactcgcaccaggttcaccaccgggccaaaaacctcctcacggctgagacgcagtccggcgtcggggtttaccaccagcgttggcggaatatagtaccctcccgcgtctggtccggcgctgccgctgataagctctgccttctgctggcgagcctcttcgaggtaggccgccaccttgtcgcagtgggcccgggagaccaccgggttgatctgcgccgtctcctgcatccccggccccacctgcagcgatttcaccgcctgctcgaagccgctgaccagggtgtcaaacagcggcgcttcgatgtagatccgcgagctggcggcgcagacctgcccctgattgaggaagcttccggtcatcagcccctcaataacccactgggggtcggcgtctttgagcacaatcgccggattcttgccacccagctccagcgtcacgcgggtcaggcggtcggcagccacgcgggcaatctgtttcccggtcgccgtcgagccggtaaagctaaccttcgccacctgcggatgggcggtcagcgccgcgccgcagccggcgccgctgccggtgaccacgttgaacaccccgtcaggaatgcccgcctgggtcgccagctccgccacccgcagcagggtcagcggggtggtttccgagggtttgatgacgatcgaacagcccgccgccagggccggcatgaccttccacatgccgatcatcagcgggaaattccacgggacgatgcccgccaccaccccgaccggctcttttttggtccacgcctggtaacgcgccccttgcgggaacgggatcgaaacgtccagcgtccggccgctgatcttggtggtcagccccgcggtgtagcgcatccagttcagggtgcagccgacctcaaaggcgcgggagatggcaatggatttcccctgctcgagggtttccagttgcgccagctcttcgccgtgctgctccaccagatcggcaaaacgcagcaggatgcgttcacggtcagccggggtgcgcccggcccagcggcgatcgacaaaagcgcgccaggcggacatcaccgcccggtcgacatccgccgggctggcgtcggcggtggtggcaatcgcctgcccggtggccggatcccagacggttaaccggttttcgctctgcgcggcgcagggggcgccgtcgatatacaggccatgctgacggtctaaaaactgctggacgctggcaagcagcgctatctgtgaggtggacataccctttccttattcatcgcggatagtgctttcagtctatgtctggttggcggttggcgcttttttctctgtgacattcgtttgcgccgctgtgacagtcgccgcaattccgtcgtctgccctcgcagaaatgtgccgcgggtgatagttctttcatatacccgccatcgcgcccttgcctgaggcgacacaaatgcaacaatgcagaaacattgttattacaggagaagggcgaatgatgaccacggcagagggagggctggcgtatcagcgctggctggcgacgatcaatcaggtctgcggccatttcgccgcccggccgttggaggagagtttccacggcgagattgacgcccgctacgccggcagcctcaaggtcagtaccgtcaccgccgccggcgtcaatctctaccgcacgcgcaatgagataaaacgcgataacgacgcctggttctataccgtgtttcagctcgccggcgaagccatcatcgaacaggacgatcgccaggtgacgctggcggcaggcgatatcacgttaatcgacgccgcccgcccatgctccatcgtctggcagcagacctcgcgtcaggcctcgctgctgctgccgcgccagcgggtggcgcccacaggggacatcactaccgcctgccggctggacaaatctctgccaatggtccagctcagccagcgactgctgctggaaagcatgggcggcacgacgctctccgccagcgagagcgaagccgcgctggaggcgatcgcctgcctgttgcgcccggtgctgcatcagcgcgatcctgccccttcccggcgggaaaagcagtttcagaagattattgcgttaatcgatgcgtccattcagtcggagcatctgcgtccggagtggctggccagcgagacgggcatgtcggtacgcagcctgtaccggctgtttgccgaccaggggctggtggtggcgcagtatattaagaaccggcggttggatctgtgtgcccaggcgttacagaacgtccatgacgatgaaaagctggcggggatcggctaccgctggggcttcagcgaccacagccatttctccaccgcctttaagcagcgctttggcgtcaccccggggcaataccgcaagcgctgtcgctaattatttgcgcagccactggccgttcaatccctggacgtactccccgggctgcgcgcgggccaccagcttctgcccggccattttcgccacttcatccaccggcagattgttgtcatccgccagctgctggtagctttcgctgcgcgcggcgttaatctgctttaccagcgccagcgtctctttatcctgacgcagcggcgcgagatagccgttcagcgtctcccccactcgtccctgctggcgcgcttcgctcagggtcaacgccagcgcgggcgcgctgagtaaagccagcgtcagcgccgcggttaacagtcgttttctcatcgtcgcctcagaacaaatcgctgcgggatttgagcaggttttccacatccttatcgaccttgatatggatctcatgctcaattttgacattcatattgatggtgatgggctctttcgacgccgcgatttcgatgcgcggcgtacagccggcgagcagcatcgacgccaccatggccagtaacagcttcttcatttaggttccttacatgtcttaccgtccgcacagcgccgtacaggcagcgtagcattctgctcgagccacgcctgtaaattgtcgccgaagcgcaaactgcgccacaggtcgaaaatattctcttcatgagcgtagtttaaatgcacggtactgcttttcccgtccacccggctggtgccgttgatgctggccttaagcgtcaacacgcccagattatcgaggttaatctgcgtccacgagcgggagatttccatatagcgcagccagttaatcgccgccccggcggagacattatccgccaccagcgcatcggcggtgtctttatccagccgcagggtcatcggtccgtcattgcgcagccagccgtcgtggatgatccattgattattctccagccacagcggcagcgcgccgctcaccgcgccggacatggcgaactgtttcaccttgacggcgctggtcagttcgctgctggagatatgctgcaggcggatcaacgccgggtcgcgctgcggcatacgcagctgcagcagcgtcagtttcccgcctaacagatcgacgctgacgtcgctgagctgcagcggattggcctcgctccacggccaggtgccctgcaggtccgccgtcagattacgcgcggtgacctggttgacgatttcgccaatgcgcagggagaccgggcggcgggtgcccaactgccagtgaccgtcgctgaagcggaacggcaggacgaagtcgacgccgttgatctggttatccggcatccaggcgctgccgcccttcaggacgccatggccgcccgcctcaaatccctgcccggctgccgccgagaaggccacctgcgcgtagagactgccttcgcgcaggttcatcttccagtccggcggcaccagcggctggaacaccgttagcgactgttttggccaccacgcctggccgcgcagccgttcgccatcccagcgcccggacagacgcaccggaccgatagcctcggcatgcagggcgccggtgaactggaaccacgtcgggtcccgaccgtcgagggcgaatttcagcgttgaggccgggagatagctgccgccggagaaggtggttttggcggcgtccagcgacagcgcgccggtcaaccgcggatgctcagcatcgcgcagccagcggatcggctgctcgagggtcagacgcggggtgctgacccgcattgtgccgtactcaagcttatcgaagccggtggagaggctgctcagggtgatagcattgtcgcgccactccccgctgcccttcacatcccagcgcgcctgcatcggggtaaaatgtccctcgccccagtagcgccactgccagcggccgctgtcgggcagaaaatcgctcgcctgaccgtccagatgcagcgtaaagtcgcccatctgctgctcatgggcgcgaaggatcgcctgcaggcggccatcgacgccctgctgagtgaccttaaccccggccagcggccagcggatttcgtcaatattcagcgcgtcgatcacccgcccgcgcgagcgcagcaacgcaccggggtgaaaagccagctgcgggctgatcagcggcccgctgagctgagccggcagcgccgcgtatagtatcatctcccccagcttggcctcgccggtgagccgcagcggcagatcgctgttatccatgctcagcttgcccggaccaatattcagtaccgcattgcccttcccggcatgcccctcggtgagaacattcaggcgaccgctgacgatcatctgttcggtgccctgctgccagttacccaccgacagcgccacccgcccgcgcagcggatacgcctcgtaacgggtgcgccagcggccgtcgctgatggtgatccgctccggggtgatctcccacggcaggtccagaataggctctacctcaccccgcggggtgaccagcagttggccgcgattgtgctgccactcgagctcagcatcgatccattccgcagtctgcgggaattcgaaggtgccctgcatctggccgtcgaccggcagaccatccggcaccagcggcagatggaaggtccccaccagcttcaccggcggctgatcgtcagtcagccgggcgctgaactggctgacggtgagcgcctggccgcgcaggcgcgcctgcagactcagttccttcccggcaaagccgatatcctgctgcgcaggcgttaatgacattaccagccgcccctgccatttctcccacggcgagagccgcagattgtcaatggttaaccagctatagggcaacatcgattgccattcggcaagcgtgcgcggtgaaccgggagagggatcgctggccggcaatttgctcaggcaggcgctgttgatctccagctggccaatatgcagccgccagcggctgggacgcgagagacgggcatcggtcacccgggcgatttcacagtcgcccaccagataacgcagatcggggatcagcagggccgaccgtgtcaggcgcgggctctcctgcaaagagatacgcgtgcccacgggcagccagatgcccgccagcgtcggcacccagtgggttagcgtcaacagcagggttagcggcaataacaccagaactaacaccagcgcgatggcggctttatatttacccttcatgggcagttaatatcctgattcaacataagtaaaagccgaaaggcgtccattgtgacacgttcgaccagtgagtgaaagtttacggcctgttaaagcatagttgccagccggactcgcggcgcgacgttcggccattatcatttaactgttgtttaagtcgcccctgccacactccagccagacgggaatagcttgcgggagaggcggtgtcgttaattatctcgctcatagagagcgcacaggaccactatccatgggtattgctgattgtttttctgcttaccttcactaaatcctgcgcattggtctcgctggcaatccccggcacctccggcctgctgctgctggggacattcgcttccgccagcctcggacatttcctgttaatgtggtccagcgccagcctcggcgccatcggcggattctggctatcgtggcggctgggcattcgctaccgtcatcgcctcacccatctacgctggctgaccgccgagcgtctggcccgcagccgcctcttctttcagcgctatggcccgtgggctatctttttcagccgctttctctctcccctgagggctacgctgcccttcgttagcggcgccagcagtctgccgctgtggtcgtttcagctggctaacgtcagctccggtctgctgtggccgcttctgctgctcgcccccggcgctttcagcctcagtttgtggtgaaaaaactttgtctttcaaagagattccgcaagtccgcgatatgctctagaattaggattagcaccctctcattaaactattttttaataattgtacgattattttaaatatgctaccgtgacggtataatcactggagaaaagtcttatgaaaatcgcggtttatagtacgaagcagtacgataaaaagtacctgcagcacgttaatgatgcatacggctttgaactggaattcttcgatttcctgctgacagcgaagactgccaaaaccgccaacggttgcgaagcggtatgtatcttcgtcaatgacgacggcagccgcccggtgctggaagagctgaaggcccacggggtgaaatatatcgccctgcgctgcgccgggtttaacaacgtcgaccttgaggcggcaaaggagcttggcctgcgcgtcgtgcgcgttccagcttactctccggaagcggtcgctgagcatgcgatcggtatgatgatgtcgctcaaccgccgcatccaccgcgcttaccagcgtacccgcgatgccaatttctccctcgaaggcctcaccggcttcaccatgtacggcaaaaccgccggggtgatcggcaccgggaaaattggcgtagcgatgttgcggatccttaaaggcttcggcatgcgcctgctggcgttcgacccgtacccaagcgccgccgcgctggagctgggggtggaatatgttgacctcgccacgctgtacaaggaatcggacgtgatctccctgcactgtccgctgaccgacgaaaactaccacctgctcaatcgcgaagccttcgatcagatgaaagacggggtgatggtgatcaacaccagccgcggcgccctgatcgactcccaggcggccatcgacgccctgaagcaccagaaaattggcgcgctggggctggacgtttatgagaacgaacgcgatctgttctttgaagacaaatccaacgacgtgatccaggacgatgtcttccgccgcctctccgcctgccataacgtgctgtttaccggccatcaggcgttcctcaccgccgaggcgctgatcagcatttcggagaccactctgggtaacctgcagcaggtcgccaacggcgaaacctgtccaaacgccatcgtctgacgcctttcccttttgtgctcctctcccggggggagcacattcagataatccccacagatccccgctgcgataccgttacactggcttggttttattagttatgtgaatgttttggagtgaaaatgaacaaatttgcggcgcttctggcggcaggtatgctgctgtccggctgtgtctataacagtaaggtgtccaccggtgcggaacagctgcagcatcatcgcttcgtgctgaccagcgtcaacggccaggcggtcaacgccagcgaccggccgctggagctaagcttcggtgagaagatggctattaccggcaagatgtatgtatccggcaatatgtgcaacggctttagcggggaaggtaaagtgtcggacggcgagctgaaggtcaaatcgctggcgatgacccggatgctgtgccacgacgcccagctcaataccctggatgcgacgatcgacaagatgctgcgcgagggtgcgcaggtcgatctgacggaaaaccagttgacgctggcgaccgccgaccagacgctggtctataagctcgccgacctgatgcactagccggcgttgatgtgccgctgacgctgccccgcgacggggccgctgttagtagccgcagctgccgcccgccagcgcctgctcgctgcagcgtttgccgttcggcagcgcgcacatgccaattgccgaaccatcgagctgacgagccaccgataacgagccgcctatcatggcgcagttggcctgaccggcgtcgctcatcgccgcccgcattcccggcgtgacgtgcgccgccgtggcctgctgaacgggttcactactgcacgcggacagcaacagcgccgcacatcctactaacatcgcagctcgcattctctctcccctcggaaacgtcttaaaaaagcaaaccccagaataataggcagcgtggcgggcggcgtcgagaggggaagtacgtatttatgcgcctcattaacattttctagcaaattttcgccgaaagcttgatctgcctcggccatgtcgcccgacgcaggtggttcctctcccggcaggcagccattttctccgcgaaccacgcaaaatattgatctggtcacgggtacccggcgcattgaggacacaaatgcaaaaatggcggggtcagcggtttgctaaactaccccttatataattacagggcgcgtcgcggtttcacgcgtccattcttttgcgcaatgtaagggtgtcttcatatgattacgattgatggtaatggcgcggtcgcttccgtcgcgtttcgcaccagtgaagttatcgccatctacccgatcacgcccagttcaacgatggcggaacaggctgacgcctgggccggcaatgggctgaaaaacgtctggggcgatgttccccgcgtggtcgaaatgcagtcggaggcgggcgccattggcgccgtacatggcgcgctgcagaccggcgccctctccacctcctttacctcatcgcagggcctgctgctgatgatccccaccctgtacaaactggccggccagctgatgccgtttgtgctgcacgtcgccgcccgcactgtcgccacccatgcgttgtcgatcttcggcgaccattccgatgtcatggccgtccgccagaccgggtgcgccatgctgtgcgccagcagcgtccaggaagcgcaggatttcgcgctgatctcgcatatcgccaccctgcaaagccgggtgccgtttattcatttctttgatggtttccgtacttcgcacgaaatcaacaaaatcgccccgctggcggatgacactattcgcgccctgctgccgcaggataagatcgctgagcatcgccagcgcgcgctcaatccggaacacccggtgatccgcggaacctcggccaaccccgacacttacttccagtcccgggaggccaccaatccgtggtacgacgcggtgtatgaccatgtcgagaaagcgatggacgatttcgctgccgccaccggccgtcagtacaaaccgtttgagttttacggccacccgcaggcagagcgcgtgatcgtcattatgggctcggccatcggcacctgcgaagaggtggtcgatgagttgctgagtcgcggcgagaaagtcggcgtgctaaaagtccgcctctatcgcccgttctccgccgcccacctgctggcggcgctgccggaaagcgcccgcgcggttgccgtactggatcgcaccaaagaacccggcgcgcttgccgaaccgctttacctcgacgtgatgaccgccctggcggaagcctttaaccgcggcgagcgcgagacgctaccgcgcactatcggcggccgctacggtctctcctccaaggagtttggtccggaatgcgtgctggcgatattcagtgaattgcaggccgcccagccgaagccgcgctttaccgtcgggatctatgatgacgtgaccaacctgtcgctgccgctgggcgaaaataccctgccggcagaggccaagctcgaggccctgttctacggcctcggcagcgacggcagcgtgtcagccaccaaaaacaacatcaaaatcatcggcaactcgaccccatggttctcccagggctattttgtctatgactcgaagaaagcgggcggcctcaccgtctcgcatctgcgggtcagcgaaaaaccgattcgttcatcgtatctgatttcgcaggctgatttcgtcggctgccaccagctgcagtttatcgataaataccagatggccgagcggctgaagcccggcggcattttcctgctcaacacgccgtacagcgccgatgaggtctggtcccgcctgccccaggaagtccaggccaccctgaatcagaaaaaagcgcgtttttacgtggtcaacgcggcaaagatcgcccgcgaatgcagcctcggggcgcgcattaataccgtgatgcagatggcctttttccatttaacccagatcctgccgggtgatagcgcgctggcggaactgcaggcagccatcgccaaaagctacagcagcaaaggtcaggagctggtggagcgcaactggcaggcgctggccctggcccgtgaatcactggcggaagtaccgctccagccggtgaacgccagcagtccgaaccgcccgccggtggtctccgacgccgcgccggatttcgtcaaaacggttaccgccgcgatgctggccggcctcggcgatgcgctgccggtctctgccctgccgccggacggcacctggcccatgggcaccacccgctgggagaaacgcaacatcgccgaagagatccccatctggaaggaagcgctgtgtactcaatgcaaccactgcgtcgccgcctgcccgcactcggcgatccgcgccaaagtggtcgccccggaagagatggagaacgcccctgccagcctgcattcgctggatgtgaaatcccgcgatatgcgcgggcagaaatacgttctgcaggtcgccccggaagactgcaccggctgcaacctgtgcgtcgaagtgtgtccggcgaaagaccgccagaacccggagatcaaggccatcaatatgatgtcccgcctggagcatgtggaagaggagaaggtcaattacgagtacttcctcaacctgccggaaatcgaccgcagcaaactggagcgcattgatattcgcacctcacagctgatcagcccgctgtttgaatactccggcgcctgctcgggctgtggcgaaacgccgtatatcaaactgctgacccagctgtacggcgaccgaatgctgattgccaacgccaccggctgctcctccatttacggcggcaacctgccctcgacaccgtacactaccgacgccaacggccgcggcccggcatgggccaactcgctgtttgaggataacgccgaattcgggctcggcttccgcttgaccgtcgaccagcatcgccagcgcgtgttgcgcctgctgagcgaattcgccgacaagctgccggcagagctgaacgcggcgctgcacgccgaggcgacgccggaagttcgccgcgaacaggtggcagccctgcgtcaggcgctggccggcgtggcgggagctgaagagctgctgaccgatgccgacgcgctggtggagaaatccgtctggctgatcggcggcgacggctgggcttacgatatcggcttcggcggcctggaccatgtactgagcctgacggaaaacgtcaatattctggtgctggacacccagtgttactccaacaccggcgggcaggcgtcaaaagccaccccgctgggagcagtgactaagtttggcgagcatggcaaacgcaaggcgcgtaaagatctgggcgtcagcatgatgatgtacggtcatgtttatgtggcgcaaatttcgctgggcgcgcagctgaaccagacggtaaaagcgattcaggaagcggaagcctatccggggccatcgctgatcatcgcctatagcccttgcgaagagcatggctacgatctggcgctcagccacgaccagatgcgtcagctgaccgccaccggcttctggccgctctaccgcttcgacccgcgtcgggcagatgaaggcaagatcccgctggcgctagattcccgtccgccatcagacgcgctggccgagacgctgcttaatgagcaacgtttccgccgcctgaacgcccagcagcctgaagtggcggagcagctatggaaagacgccgccgccgatctgcagaagcgctatgactttctcgcccagctggctggcaaagcggagaaatcgccaagcgaaggttaaccgccccgtcacctttgtccataaaaaaagcccgaacacaacgttcgggcttgtcgttttaccgataaacaacatcattccgcagaatgagacggcaacaataaattattggcatgacaataaaggcatataacgcgcaaataatacgtgattagcccgggcatgtataatttttattttgtatattatctataaatgcattcagcataattatcaccatttcattggtattatttattttagattttacttatatcgtaacaattgagtcttaccggatctcagaccgctcctttagcatgagttcacttcccacccggaagttaaaacataaaaacagttaaaggaatttcttcatgaaaagaaaagtactggccctcgttattccggctttattagccgccggtgccgcgcatgcggcggaaatttataataaagacgggaataaattagatctctatggcaaggtagatggtctgcattatttctccagcgactcgaaaaaagacggcgatcaaacttatttacgttttggctttaaaggcgaaacccagatcaacgatatgcttaccggctatggccagtgggaatataacgttcaggccaacaacaccgagacctccagcgatcaggcgtggacccgtctggcattcgccggtatcaaagtgggcgattacggctccttcgactatggacgtaactacggcgtgctgtacgacgttgaaggctggaccgatatgctgccggagttcggcggcgactcctacacctatgcggataactttatggcaggccgcgccaacggcgtcgcaacctaccgtaacagcgatttcttcggtctggtggagggtctgaacttcgccctgcagtatcagggtaaaaacgaaggccagaacgcgcaggatatcaacgtcggcaccaataaccgcagcagcgacagcgatgttcgctttgacaatggcgatggtttcggcctctccacttcctacgacttcggcatgggcatcagcgcggcggcagcttacacctcgtctgaccgtactaacgatcagatgacccagaccaacgcgcgcggcgataaagcggaagcctggaccgccggcctgaagtacgacgccaacgatatctacctggcgaccatgtattctgaaacccgcaatatgaccccgtacggcaatgacggcgtggccaataaaacgcaaaacttcgaagtcaccgcgcagtatcagttcgacttcggcctgcgtccggccatctcctacctgcagtccaaaggcaaagatctgtacaataacggccgctatgccgataaagatctggtcaaatatatggacgttggcgcaacctattacttcaaccgtaatatgtccacctatgttgattacaaaatcaacctgctggatggtaacgacaaattctacgaagacaacggtatctctaccgataacatcgtcgccctgggccttgtttaccagttctgatgcgcctgcccgccggttccggcgggctttcccccacccgcctcgctgcagataaaacaaaacgctatatctcgcggactaaaatagccgttcgtttaatgatatagtcatggccagtcagtgcttgcccgaggacgtccatcatgcaccaccatccggttaaatcttcccgaattatctccgtcgcctacgatgacgcttccgccacactggaaatctatttctatcaccagccgccattacaatataccggggtcccaccgcgtatttttcatgattttttacaggtggtgtcaaaaggccggtattatgacggggtgatcaaaggaaaatttcccgaacgcaagctacgttaatgtcaaagtgtgactgcggtcatgatacaaaacgtgccctaataccgtacaatatgaagggatacttaaacaggaggttttatgagcagaatgattcttgtccctatcgatatctctgataaagaatttactgaacgcattatcagtcacgttgaatcggaagcgcggattgacgacgccgaggtgcatttcctcaccgtgatcccttctctgccctattatgcctcactgggaatggcctataccgctgagcttcccggcatggacgagctgcgtgagggttctgaaacgcaattgaaagagatcgcgaagcagttctccatcccggaagaccggatgcattttcacgtcgcggaaggatcgccaaaagataaaatccttgcgctggccaagtcgctgccagccgacctggtgatcatcgcttcgcaccgaccggatatcacaacttatctgctgggctccaacgccgccgcggtggttcgtcacgccgagtgctcggtactggtggtccgctaacgccgcagcccgccgcccggcgggctttttatttccgcatcagccgcccccgcctggctgctcgctgccgaaagtgccggaaagatgctgacattccgcccctgaatccgtaccatacacgccacggttgcctgtcaaacctcaataattgctacgcgccagcgccacgttgttcagcggctggcagaatgcgtgctcttctgatgccacactatgaattgagccactattacatgctgcaaaaccaagaaatcagtaaaaaagaaaagtacaacatcgataagctgcagaaacgtctgcgccgcaacgtcggtgaggcgattgccgacttcaatatgattgaagagggcgaccgcattatggtttgtctttcaggcggcaaggacagctataccatgctggagatcctgcgcaatctgcagaaaagcgcgcccatctccttctcgctggtggcggtgaacctcgatcagaagcagccagggttcccggagcatattctgccggagtatctggagcagctgggggttgaatacaagattgtcgaagagaacacctacggcatcgtcaaagagaagatcccggaaggaaaaaccacctgctcgctgtgctctcgcctgcgtcgcggcatcctctatcgtaccgccaccgagctcggggcgaccaagatcgccctcggccatcatcgcgacgatatcctgcagacgctgtttttgaatatgttctacggcggcaaaatgaaagggatgccgccgaagctgatgagcgacgacggcaaacacatcgtcatccgcccgctggcctactgccgcgaaaaggacatcgagcgcttctcccaggccaaaggcttcccgattattccgtgcaacctgtgcggttcgcagccaaacctgcagcgccaggtgatcgccgatatgctccgcgactgggacaagcgttatcctgggcgcattgaaaccatgttcagcgcgatgcagaacgtggtgccttcgcacctgaacgacgtcaatctgtttgattttaaaggcatcacccacggctcagaggtggtggatggtggcgatctggcgtttgaccgggaagatattcccctgcagcccgccggctggcagccggaagaagaagacgcccgtctcgatgagctgcgtctgaacgtagtggaagtgaaataaccctcacgcgtctcaggcagccgcctgagacgcactctcctgcccttacttcagcagtcgtacgcggcaggatttacctttgatcttgccattttgtaactgcttatacgccttctgcgccatattctggcggatcgccacatagacgtgggccgggtggacggtaattttgccgatatcggcaccatcaaagcccatatccccggtcagggctcccagcacatctcccgggcgcattttcgcctttttcccgccgtcgatacacagcgtcgccatctccgccgtcagcggcgcgatggtgttgcccgtcggcgcaggcagccagttcagggaaagctgcagcatgtcggccagaatagtggcgcgctgcgcctcttccggcgcacagaagctgatggccagcccttgttcaccggcgcgggcggtacggccgatgcggtgaacatgcacctccggatcccaggccagctcgaaattcaccaccagcgccagggatttgatgtccagaccgcgggcagcgacgtcggtcgccaccagaacccggacgctgccgttagcgaagcgcaccagcgtctgatcgcgatcgcgctgctcaaggtcaccatgcagcgacaaggcgctctgcccggcggcgttgagcgcatcgcagaccgcctggcaatcgcgtttggtgttgcagaacaccacgcaggatgccggctgatgctggctgagcaggcgctgcagcagggcaatcttaccgtggcgggaaacctcaaagaactgctgttcaatcgccgggagcgcgtcgacagtgtcgatctcaatggtctgcggattgcgctgcacccggccgctgatcgccgcgattgccgccggccaggtagcagaaaacagcagcgtctgccggtcagccggtgcgaagcggatcacctcatcaatggcatcgctaaagcccatatcgagcatgcggtccgcttcgtccatcaccagggtctgcagcgcgtcaagggagaccgttcccttctgcagatgatcgagcagacggcccggggtggcgacgataatatgcggggcatgctgcagggaatctcgctgggcgccaaagggctgcccgccgcagagcatcagaatcttgatgttcggcaggcagcgcgccaggcggcgcagctcgccggcgacctgatcggccagctcgcgggtcgggcataacaccagcgactgggtctcgaagcgcgccggatcgatatgctgcagcagacccagcccaaatgcggccgtttttccgctgccggtttttgcctgcacgcgcacatctttccccgcgaggatcgccggcagggcggcggcctgaaccggggtcatcgacagataacccagctcgttaaggttggctaattgggcggcaggtaaaacagtcagggtagaaaaagcggtcacaatgtattctcgtattaaaaggcagacaatctgcaggcgcgtatcctcgcagatctccgcgcctgatgcgacaatttaatcggctcttcgtcaggcggcggatcgggctggggctgcggacgcggtcgtggatcgggtaaaggagccggatcgttcggctcgggcgagatagggatagactgggctgtcagccctgaagcgtaatacatagaggcctcccggagagtgatacgggcgtacccgcaggcgtcaacggccagaaaccgtcgggtgtcttagtaagggtagaagctggtccggagagcgcaaaaaaaaagccgactcaacaaagccggcgtcgtacgaatcaattgtgctatgcagtaattcaaaaaaggaagtaagacaatatggagcgcaacgcccatcgcttgacgttgcattcacctgcgagagagatattgccctgaatgggtagatggtttattgatttcgctcaaacattgccgggttttcccggcactacagccgctaaaaggcgattctttacagccatttactgcgatgtaaccaccacgcaacaccaccgatgacaacgactaacatcaagcagaaaaggctaaaccccagatgccagctgttgccagggatcccgccgaggttgacgccgaacaggccggttaaaaaggtgctgggtagaaacaccatcgccatcaatgacatggtataggtccgccgcgccagcgactcctgcataatctgggcgatctcgtcgctcatgatcgccgtccgcgcgatacagctgtcgatctcatccagaccgcgccccagccgctcggcgatatcctgcattcgccgccgctgatcgtcactcatccacggcagccgctcgctggccagccgggcataaacgtcgcgctgcggcgccatatagcggcgcatcacaatcagctgcttacgcagcagcgcgagaaatccgcgcggcggcacctgctgatcgagcaggtcgtcttccaggtcgataatgcgatcgtgcagttgttcgataaactcgctggcatgatcggtcaacgcatcgcagacctccaccagccagctgccgccgtccgtcgggccattaccttccttcaggtcgcccagcacatcgtccagcgccagcactttgcgctgacgagtggagacgatcagccgctcatccatatacaggcgcatcgccaccagctggtcgggccgctcatcggtactgccgttgatacagcgcagggtgatcagcgccccgtcaccgatccgcgtcacccgcggccgggtgctctcccccgccagggcatcgcgtacgttattgggcagcaacggagtggccgccagccagtcggcgctgtcgctatgggtatagttgagatgcagccagcaaggcttgtctttgtcgataatatcgtcatcggcgagcggcttaacgcccccctgcccgtcgagcacccacgcgaagatcgcgtccggtatctgcaactccgagcctttaatcgcgtccactcaacctccgttaatccatatctgctaaattacgcgccttctctataaggtacgcgaaagcgcgcattcttgcttttaatgacccggaaatacaggcctagtcgcttcattgaaaagcgcattcgcccccggtcgcggcgctcccctcatttaacgttaaaacttagtgaaatcaagttcttcacgattcaacacatacagagcgacgttttgccgtttattttgcaacttcttgctgtattatgctgtttattgcgttaatttgaggagtcaatggccatgcataagctcgccaggcaaaaacatattctcgacaggcttagcgaaaccggtcagctgagcatcagcgaactggttgcagagttgcaggtgtcggccgataccattcgccgcgatctgagcgacctggaacaacagggcgtgctgcagaaaagccacggcggggccatcgcccttaacgtcccggccatgacgcgtcagggcagaaacgctcttctcacccagaccaagcagcgcctgggtcagcaggtcgccgcgcgcattccctctggctcgacgctgtttctcgacgccggaagcacgctgctggcggtggcagcccagctgaaagggccgttgaccgtgatcacggcttctctggatatcgctcagctgttcagcgaccgtgccgatatccagctgatcctgcttggcggtcagtgggatagtaaacaacgactgttcgccggcagcgccaccctgtcgctggtcacccgctaccgggccgatatcgccattctcggcgcctgcgcgctccatgccgggctggggctgagcgccagccaggaagctgatgccgacgttaaacgcgccatgctggccgccagcgccgagcactggctggtggcggaccataccaaactcaaccgctgcgaaccgtggcgggtggccgggctcagcgacattcaccatctttttcttgatcgtccctgggctgagctgggggatgaccccgccctctctgtacatattgctgacgcttaacaacgtggagaacctgatgagtaacaacacgataaatatcgccctgattggctacggattcgtcggtaagaccttccacgcgccgcttatccgttcggtgccggggctgaacctggcgttcgtcgcttcccgcgatgaagagaaggtcaaacgcgacctgccggacgtcacggtgatcgcctccccggaagcagcggtccagcatccggacgttgacctggtggtcatcgcctcccctaacgccacgcacgccccgctggcccgcctggcgctgaacgccgacaaacatgtggtggtggataagccctttaccctcgatatgcaggaggcccgggagctgatcgccctggcggaggagaaacagcgtctgctctccgtcttccataaccgccgctgggacagcgactatctcgggatccgtcaggtgattgagcaaggcaccctcggcgcggtgaaacacttcgagtcgcatttcgaccgcttccgcccggaagtccgcgtgcgctggcgcgagcagaacgtcccgggcagcggcttgtggttcgacctggggccgcacctgatcgaccaggcgctgcagctatttggtttgccgcagtcggtgcaaggtaacatagccaccctgcgcgacggggcggagatcaacgactgggcgcatgtggtattaaactacccggcgcataaagtgatcctgcactgcagcatgctggtcgcgggcggctcgtcgcgcttcacggtgcacggcgataaaggtagcgttatcaaagcgcgggccgaccaacaggagagccagctgctggcgggcgtggtaccgggcagcgccggctggggccaggatgacgacccgctggttatctatgatgcctcgctgcaggcccacgcgcaggctaccccgcagggcgatcagcgccagtactatatgctgatccgcgatgcgctgaagggccagatcgccaatccggtgccgccggtggaagcgctggcggtgatggccgttctggaagcggcggtgcgctctgctgaaagtggtatggtgcagaccctggacctgtccgacgacgagcgcaacacgctgcgctaatccgccctgttctccggttacctgcgcggcccgcaggtaaccggtacttttgctccacattagaaaaaatcactatctatccgcagattaacattgctttatcctgctccatggcgcaaagcaccgctggaaatttcagccaattgggaggaggatagaatgcagatcgatcgtaatgagaaagaggttgctgacgctgtggacgcggcaaccgtactaccggacaggagaagcgcatgtattacacgttaggagataccactctccatttttatcgctatcagtgcaaattttacgtcgcccactgggaagggggtaacgtgatgagcgaaaaatttaaatcgtttatcgaacagatcactgagaagaccgggctggatgcgaaacgcgtcgagaccgccgcgcgcgattattttactaacgtggattaacaggcagcgctgttcgtaagagacaagctggtacggtagccgcgcaggctaaccccacctttcaccgccaggacgcctcgcgccgcctggcggcttctctattctgccagcattaaacggtagtcagttttgccagaatggaggcgaaggcgtcattaaccttatcgccggcgagcagttttttacgcaacgtgaagcttctgccgctggaacggatcagcagccggactttcgcatcattattgctgcgttcaactacggcaacatcccgcaagggaataacgtaggtatcggcatagagccccggcgtaaatatcatcgactcgccgctcacgccaatcaccacccgattttgcagacgatagccattgcacagcgcaacaataccggcggcaataaatactccgcctatccccatgccaatcattaaaataatgatcccggcgatgagcgccagcgccccttggggataaaagcctgaggcattaaaggttaatagctgctggttatcagcctcgcccactgccgtggttgatcgccagggcgtaaatccggcgttaatccgcgtttgcaagctgaacagactacccaccagaaagatcacgctggcgggcaccatcacgataccgccaacaaacgccaggacgatggccagataagggtagcggcctgacagcattatgctgatcgcctgaaccaccacggcaataaacagggccagcaccagccaggaccatacgccgtccgcccgactatggaagttcagctgtccttcatcaagtaataaatttcgcgcgacaaaacagataataatattgacgaacaggcctatccaggccagcttgtgcacatgcttcataccctactccattatggtttttactattccatttccaggcattattaaatacagtctcaatgccggctggatagtagcaaagcggtacgcaagatcaataaaaagcgcgcggtctcctcacattctaatttatattcagcgtgatattgttagttatcatttatcgtaattatataaaccatcctatatattggcgctatatattttcagcgcaataatatcgccctgccgccaggcagggcgtcgcagattaacgctcctcaagcgccgccaccggcgccggcgcgcttttcctgcgcagcagatagcctgcagcaaggatcagcagccataccgggatcaggcagacggagatgcggatgtccggggtcagatacatcaccccgaggatcgcggcgagaaacagcagacacagccagtttgtcaggggataggcgaaactctggaaagccgttaccttccccgcccgctgcatggcgcggcggaacttaagatgagtgatgcagatcatcgcccagttgatgaccagggcggccaccaccagggccatcagcagggcaaaggctttcccgggcatcacatagttaatcaccacgcaaagcgccgtggcgacggcggataccgccagggcggtcaatgggatcccgcggtggttcacccgcagcagcgcacgcggggcgttgccctgctgagccaggccgaacagcatccggctgttgcagtagacgcagctgttgtagaccgacagcgcggcggtgagcaccaccagattgagggcgttggccacaatattgctgtcaatggcgtgaaagatcagcacaaaggggcttcccccttccacgacgttccgccacgggtagagtgacagcaggaccgccagcgaccccacgtaaaacagcagaatacggtagatcacctggttggtggctttgggaatggttttatgcggttcgtcggcttccgccgcggtgatccccaccagctcaagcccgccgaaggagaacatgatcaccgccatggccatcaccaagcccgtgatgccgttagggaaaaatcccccgtcctgccacaggttggccaccgtcgccgccgggccgccgtgaccgctaaataacagatagcagccaaaggcgatcatgctgatgatggcggccactttgacaatcgagaaccagaactccagctcgccatacactttgacgtgcgtcaggttgatggcgttgatcgccacgaagaagatcgccgccgacagccaggtgggtacctccggccaccagtactgaatatagatccccaccgccgtcagctccgccatgcttaccagcacgtacaacacccagtaattccagccggacataaacccggcgaagggcccccagtagcggttggcgaaatggctgaacgaccccgccaccggctcctctaccaccatttcgccaagctgacgcatgataaagaaagcgataaccccggcgatggcgtaccccagcaggaccgacgggcctgccatacggatcgtttgcgcgatacctaaaaacagtccggtgccgaccgcccccccgagggcgatcaactggatgtggcggttttttaacccgcgttttaactgatgctcttgctgcgttgtcatctctgacctgcccctgtctgtaaaaagtcacgttcgccggtagcaactttcaggccagcggagcgccttgcagcgtcagacaaaaattaattaattgaaatatattcaaatattcttttcaaatcagttccggtagctggtcatgtcggcgccgacctggcgcatcacacgcgaaaactggccagataacgcacagatcatgagaaaaagagcggattaatgcatgaacctgacccgttttggtgcatccggtttgccgccgtccgctcaggcttcacgccaggcaaaaaactgttaggctggtagccacttttacgttccgctagtggccactatgtacaacatcgacgactatgatctgaaaatacttaccctgctgcaggccaatggccgtttaaccaatcaggagctgagcgagcttatcggcctgtccgcttcccagtgttcgcgccgccgtatcgcccttgaacaggcacagcttatcctcggctaccatgcgcgtctggcgccggatgcagccgggcaggagatgcttggcctgattgaggtgcgtctgctgaatcacaccccgcaatgcgtggagagctttcatcagatgctcagtgaagtggacgccattctggacgcctggaaaaccaccggcgacgccgattatctgctgcgggtaacggtcccggacctgcccggtctgagccatttgatcagccatattctggcgcaaaacaaaggggtggcccatctgaaaaccgccgtcgtgctcaaccgcctgaaagagaacggccagctgatgccgggcacgaccccgctgcgctgaaccggggcacagtgccctgcgctggtgcagacgcggggccagacaatgcgcgacaagcggcaaattcgcacaattcacgcattcggaaaccataaaacgcacgacccgtgcaatttcctcttcctgtcagaacaacaggttaggctaaaccacggctattttttccgcaaacgctcgccagggcacgctcctctggtgcgatttttgcaaacaagagcttatccttgttaacgaaaagatagtgcttatttatggataacgtcctttcccctgaaaaactgacccacacctggctggaggatgccctggcgctgctgttcggcacgctgatgatctcctttggcattatcctctttcgccaggctggcgccctgaccggcgggacggcgggcatggcctttctgatccactacgccacccacttgccgttcggcgtggttttcttcgccattaatctgcccttctactggctctccgtccggcggatgggcgccgccttcacgctgaaaaccttctgcgcggtcggactggtgtcgctgttctccgacctgcacggctactttatccatgtcgatcgcctgaacccctattacgccaccctcttcggcaacatcatggtcggcatcggctttgtggtgctgttccgccataaagcgagtctcggcggcgtcaatattctggccctctatctgcaggataaaagcggcatccgcgccggtaaattccagatggtagtggacgcctgcatcgtcaccgcctcgctgtgggtggttagcctgccgatgctgctggtctctgtcctcggcgccgtgattttgaattcgattatcgccatgaaccaccgccccggacgctatgcggtgtaatggcttcacctttaacggtcatttcaggagtaaccactgtgttccagaacgttgacgcctatgcgggcgatcctatcctgtcgctgatggaagcctttcaacaggatccccgggcagacaaagttaacctcagcatcgggctgtactataacgagcaggccattattccccagctggaggcggtccgtcaggccgctgaccggctgcagagtcagcagcaaaaggccagcctttatctgccgatggaggggctggcgccctatcgccgcgcggtccagaccctgctgtttggcgacaatcatccggcgttgcgtgccggacgcatcgccaccatccagacactggggggctccggcgcgctaaaggtgggcgctgatttcctcaagcgctacttccccgactccgcggtctgggtcagcgatccaacctgggagaaccacgttgccatctttgccggcgccggctttgaggtacatacctatccctggttcgacagcgccacccgcggggtgaatttccccgctatgctcgccgccctccagcagctgccgccgcgcagcattgtgctgcttcacccttgctgccataacccgacgggggccgatctcacccgcgagcagtgggatcgggtgattgaggtgctgatcggcagggagctgatcccattccttgatatcgcctaccagggcttcggccgcggactggacgaggatgcctatgccattcgcgccatcgccagcgccgggctgacggcgctggtcagcaactcgttctcgaagattttttcgctgtacggcgagcgcgtcggcggcctgtcggtggtctgtgacaacgccgatgccgccgggcgcgtgctgggccagttgaaagccaccgtgcgccgcaactactccagcccgccggggtttggcgcccaggtggtgtcgcaggtgctcaacgatcccgagctgaatgccctgtggcaggaagaagtggaggccatgcgcacccgcatcagcgccatgcgcgtcgcgctggtgaaggccctgcaggcagccctgccggcgggggatttttcctatctgctgacccagcgcggcatgttcagttacaccggctttagcgccgatcaggtagacgttctgcgtcaagagcatggcatctatctgatcgccagcggtcgggtctgcgtggccgggctcaaccacggcaatattgcgcgggtagccagcgccttcgccgcggtctgcgcacgctagccgggtcaaccccggcgcggtagagcgattaatcgcgacgcagccggcgagccaggcgggtccccagcgtctgaataagctggacaataacaatcagcaccagggcggtagtgagggtggcgaaagcgtcgaagcgctgatagccataggtaatagccagatccccgattcccccgccgcccactgtacccgccatggctgtggcgccgagcagaccgatggtcgccgtggtgagggccagaatcagcgatgccgccgcctccggcagcataaagtgccagaccgtctgcagcggggttgcgcccatggcgtccgcggcctcgaggatcccctcatccacctccagcaacgagctctccactagtcgggcaatatagggggcgacaaagacgatcagcggcacgatggctcccgcggtgccgatagtggtgcccaccagcagtctggtaaagggcaggatcacaatcagcaaaatgataaacggcagcgagcgcagcacgttaatcagcggattcagcgcctgatgcaccaccgggttggccacgatgccgccgggacggcaaaccaccagcacaatccccagcgggacgccgatcagcgcgccaaagcccagcgagacggcgaccataatcagggtgtcacgcagcgccagcagaaactgctcaccggtgatggcggtatcaataagatcaaacatgggtgattttcactcctgcatcgaccagatgggtgatggcgcgttcggtttcgtcaggctcgccgagaagctgcacaatcataaatcccagaatccggccctgaacttcagacatgctggcaaacaggatattcacctcgacagcatactcgcggatcaggtggttaataatcggctgctgcgccgtcgcgccgacaaattcgaggcgtaaagcccgggcgccgttatcgcgctgcaggaacgacgccacccgctgcggcaggcggtcgtgcaccaccgactgcacgaaactggcagtgaccggatgctgcggctgagcaaagagatcaaaaaccgccccctgttcaacgatacggcccgcctgcatcaccgccaccttgtgacagattttctggatcaccgacatctcatgggtgatcagtacgatggtgatgccataccgacgattaatctcctgcaaaagcagtaagatctgcaccgtagtgtgggggtcgagcgccgaggtggcttcatcgcacagaaggaccgacgggttggtggccagcgcccgggcaataccgacccgctgcttttgtccgcccgacagctcattagggtagctgtggattttgtcgctcagatcgacgaacgccagcagttccgccacccgcgcctggataaaggccttgtcgcgcccctgtaaaatcagcgggatggcgatgttatggaaaacggttttcgaattcagcagattaaaattctgaaagatcataccgatatcttttttgatggcctgcaggcgctggccgctgcaggcctgtagcggctcgccgtttaacagtacctcgccctcgccaggcgtttccagacgattaatcagccgtaataaggtgctttttcctgccccgctgtagccaataatgccaaaaatatcgcctcgctcaatgctgagattaatatcctgcaaggccagaaccggatgtcctttcctggaaaagcttttactgacgtggcgaaattctatcatcgcgttattcattttaaatagtcaggcagcaggtaaccatcatactgcggatggttgagaatatattttttgaactcggccgagtggtagccatcgataatatctttggcaaactgcgccttctgatttttaccggcgacggtcacgacattaataaaatggctggtggctgcttccagctttaaggccgaggtcagggacataccgctggagacggcaaaattgccctgaatcaggccatagtcgacgtccggcagagcgcgaacctgctgggcattatccatctcttttaggacaattttgtaaggattatctacgatgttacgctgcgaaaaagtggccggatcgctgtctggtttaattttcacccagccaaggctctccagcacaagtaccgcgcgatattcatttgacggctggtttggtaccgacacgacggtgcccgccgccggggtccccagggtggtcagtttcccaccatacagccccatcggcggcgtggggacctgcacaatgcccacgttatcgatccccagccgctcattaattgctttcagatataccggatgctgcataatattcgcttcgatatcgccgcgggctaccgcgtcattcacctgaataccgtcgctgaaatccttatattcgattttataccctttactcaataaatagggcgcgacgcctttctcaaattgttctttatacggcccggggttaaagccgacgcggataagatgagcgtcggcggcggcataaaaagaggtggccgacaacagggcgagagcgatcccgcgcgcaactgacttgttcataaggtattttcctggagggttggcgatattgaacgattaaatcacagccgactgtgggttgtaagccagaacgccgaatttccttttgctaattcctcattaacttttgctataccgacatatcttaaaaacaagaatcttttgcgtatattgttatttagccagccgctataaatcccttaaagatggttaattattcgtgatttaaaccgggaatgttatgcctgattttactgcttcgccgctggtggacgccctggaagagaatttgttcagcctgctggaaaaactggccgcggaggtcaacaccgaagcgctgccgctgatcgatctttccagcggcagtccggatcaacccaccccgccggaagtgattgactcgctgcagagcgctattcatcgtcgtgaaaaccatggctacccgtcgttctggggcaaaccacaggtccgcgaggcgatcgcccggttctatcgccggcagtatgatgtggaactcgatccgcacagcgaagtcgccgtgtttcaggggtcgcatatcggtataggcggcatcccgcgggcgctgctcagccccgggcaatacctcatctccaccgatccctgctatccgatttaccgctcggcggcgctgcagtcccaggcggcgttttatggcctgccgctcagggcggagaaccatttcctgccgaattttaacgatcttccccgggaagtcgctgacaaggccgggctggtggtgcttaactatccgcataatccaaccggcgccctcgccacgccggcgctgttcgccagcgcgctgcagtttgctcgtcgtcaccaggtgccgatcctccatgattttgcctatgcggccatcggcagcgcggccagcgatgcgccgctgagcctcttctcccagcccgacgcgaaagcatggggagtggaaacctatactttttccaagacctttaatatggccggctggcgcttcggcttcgcggtcggcaacgcctcgattatccgggcgtttaaaaagctgcacacccatagctacagcacggtgtttggcgcgattcaggatgcggcgatcgccgcgctcaacctgccggccgaacggattgcgcagctgacggcggtctatcatcaacgtcgggagtgggttctgcgtcgactggctgcgctgcgctggccggcgcgtgacgcacaaggcactttcttcctctggctcggcgtgccgcccggctaccgttcgcaggagtttgcccgcctgctgctgcaggaagcgaatattctggtggcgccgggcacgggttttggcgcagggggagaaggatttattcgcatcagcctgaccgcaggggacgaggcgctgagcaacgcgctggaccgtcttgcccggctggcgctgttttagtccgccgcagggagaagcaaaaacgcaaccctggccgtcggggattacccggctgacgagtccatcaccgacagcacgattttgccctcaagatgcccctgcgctgctcgctcatgcgccatctgcgcctgcgcaagggggaaaacgctgtcaattgcaacccggatgaccccggcgtccagcaggtcggcaagccgggcgagctgcgcgccgctggagcgtacctgggtggtggagaccgtcactccgcgctgtcgcgcctcttccgccccggcaaagccgagcggaaagatcgggtacagcgcgccgccgggtcgcagggtacgcaaaaaacggccgctggccggcccgcccggcgcatcaatgaccagatccaggtcacgcaccgtctcctccactgcggtggttgtatagtcgataaccctatccgcgccgagctgacgtaaaaaggcttcatggcagcccgcggcgacggcaatcacctcggcgccctgccacttcgccaactgcacggcgaaatgaccgactccccctgccgcgccgttgaccaggacgcgtttacccgccagcggcaccggccgatgcggccccggctgcagcggattcgccacctcatgcccgggatcgatcatgaactgccaggcggtgaggagcgacatcggcaccgcggcggcctgctgatggctcagggttaggggtttgcgagcgaggtcgctgaccggcacgctaacgtactcggcgtaagcgcggctgccccctgctgccccttcgggaaaacgcgccatagcatacacttcgtcgccgaccgccacctcccggacgtcatccgcccgcgccaccaccaccccggagagatcggtcccgaggatcaagggaaagcggacctcgggccgccactccgggggcagctgttgatagccatcgcgcagatagctgtccggcgggttcacgcccaccgcgtgcacctgtaccagtacttcaccggcctgcaggaccggcatgggcgcatcctcatagctcaggacttccggcccgccaaaggcgtgctgttgaacagccttcatcatctgcgtcgacatcgctttctcctcatatggaaatgcgttatatttaacggagcactgttccgaatatatggagcagtgctccgattgtcaaggaacgccaatgagagctgatgccagaaaaaattatgacctgttgatcgaggtggcccgggacgtctttgtggagcaaggcgctgaggcctcgctgcgcgatatcgcccgccgggcgggcgtcggaatgggaaccctctatcgccactttcccaaccgcgacagcctgctggaagccctgctccgcagccgctttgcggcgctaaccgcccgggctgagtcgcttctgctcgccgccgatcctgccgcggcgctgctggagtggctggccgagagcgtggcgtttacccatcagcatcgcgggatcatcgccccgctgatgagcgccatcgacgatcctgagtccgccctgcactgcgcctgcgttgccctgcgcgccgccggtacgtcgctgcttacccgcgcgcagcaggccgggctggcacggccagatctcagcggagaggagctgttcgatctgatcgccgcgcttgcctggctgcgggagcaaccgtcccatgccccgcgcgcagagcggattttagcggtgctggccgacgcgatcctgactgccggctagcggcggccggtcaccgacgatacagcgcgcctggcgggtgaccggaacaccagcctttaactatcaaacgcccagcgggccccgctggtcagcgcccgctcgaaggcgggacggccggggccggccagccagccggcgaaggtgtgcagctgcgggtgcagctggcgcagggcgtcgaggtcggcgtgcccggccagccgcccgtcgtccaccagcccggtcagcttgtgcagaaaaggactggcggccagcacctcgtcggaaaatcgcgaataggggatcggccgtcccgccgccgcggagaataacccctccagctgacgaccggtcacgctgtcgctggcgatctcgaacgtcttgccggcaaaccgcgccggcgcggcaaaaaccgccgcgacaagatggccgatatcctccaccgccagcacctgcattctcccctccggcaacataaaaaattgaaaacgaccttcatcaaggccaaaaccgggcatcaccagcagctccataaaggtggcgggccgcacgatggtcgccgccagcggcaggcggcgaatatgccgttcaatttccgctttggtgtcataatgcgctacgccggtcggcgtctcccccgtcgcgctgccggagctgtacaccagatgcttcaccccgcactcgacggcgagatcggcgatggttatcccgtagcgtacctcctgctcatcggtcaccgtccctcccggcgaactgggctggacgctgaagacgccgtcgaccccggccatcgccgaccgcattgccgcccggtcttcaaaggtacccacgaccagctcggctccccgcgccgccagcgcagcggccccggcggagaaaggatccctgaccagcgcccgaacccgccagccgcggtgcagcagcgcccgcgccaccgagccgccctgctgaccggtggcgccaaaaaccaacacggtttgcgcattattcatcactgttccccttatctgcagcctgtttcccggcctctcgccagcgatagtcaccttgcttatccttctccagccagccgcaggaaggcccggcaaaatgcccggtgaaccattgagcatgatggcttgccccccacgccatcatctcccgtcgcgagacttccgcctgccggggatcgccgcagaacgctgaattccactgcggatgggcaaactggatcggggaatgcagaagatcgccggagaaacaggcgtagtcatctccagcggcgaggaccagcgcggcatggtccggactgtggccgggggtgggaataaagtcgatccgtccgccgacccgcggccgggtcgccacatcgacggtctccagctggccggcctcaatcaccggcagcaggctgtcaagccacagcgcccggtagcgttcgctgtttttcacccgcgacagctcttttgccgagcacagatagcgggcgttgggaaacagcggcacccagcgatcgtcctgccagacggtattccatccgacatggtcggtatgcaggtgagtcagtagcaccagggtcacgtcctccgggttcactcctgcggcgcggagattctccagatacggcgtgttaagttgatgatagagcggattgccgccgcgctcccgaccattgccggtggcggtatcgataacaatcagatcgtggggggtctgcaccacccagctgtggattgacagcgcaatcggctgaataacggcctccgcctccgctaccgggaacgcctctggatagagcgctgccggctgcagggaaatctcgcgctccggcactttgaaaatcaggctatcgcctgtctggtaagtttgcatcactccctccgcgcgcattgcgctggttgatttatcggggtgatattcactatgctgccgggataacccacattcaaattgattatcataatgaacaaaatcattgaaaatgattttagtcgtatcgatctgaatctgttgacagtcttgatggtgctgtaccgcgaagggagcgtcacccgcaccgcagaggtgctgcatcttggccagccggctatcagcggggcgctgaaacggctgcgcgagatgtttgacgacccgctgttcgtgcgcagcgccagaggcatgctgccgacgccgcgggcgcaagcgctgatgaccgacctgcagccgctgatggaaaacctgcattcggcgatgtttggcgccggagagttcgtcccggcgcgcgcgcagcagctttttcgcatcggcctcagcgactggagcgaacactggctgatgcccccgctgttacccgggctgatgcaggaggcgcccggagtctcactgcagtcgatagccgccgaccccttccaggttcgccagttgctggaggaggagcgcattgatgtcgcggtgtctgtcaacaaacagagccgtggggagatcgtcagcgagccggtgatgtccatgggagtcaccaccctgtggtcgccgcagcagatcccctgccgcggtccgctgtcggtgagcgactttgtcgcctgggaacatgtgatggtggcctatcgcgaaaccggccacggtgaaattgaccgccagctcgccagccagggactcgcgcggcgcgtgcgctttgccacgcagaatttctccacctttcccctgctgctgaccaccctgccgctgttcgccaccgtcccgcaggggctggcgcagcgctggcaggcgcagtatgcgctgcgcgcggacgctccgccggtagcgtatccggaatttacgctgtgcattttgcggcacaaacggcgggcgcaggatccggcgctgaactggctggtgacgaagttaaaacaggccatgcgcggccaataaccgggccgatgccccggcatcaggcctcgctgtgcgggggttgcagcacacgcctgctccagtcataaaacgcgcgcaccgccggcggcagatagcggttttgcggatagaccagcgacaagggaagatcagaagcggcctgctccagacaggcgaccagcgccccgctctgcagataaggttgcgccagatagctggcgacgcggatcaggcccagcccctgaatgccagcctgaatgtaggcatcggtatcgtcgaccaccagcgtctcccgcatgcggatcgcgcagtcgccttcatcgagggagaaaagccagtcgatggtccgcccggtacggtgattcaggtagcccaccgcccgatgctggtgcagttcgtcgatgctctgcggccggccgtgggccgcgagccaggccggcgaggcgaggaccatccagcgatagcgggccagaggacgcgccaccagggtggtggaatcttcgatccgcccggtacggatcacgcagtcgaatccctcctgaataatatcttccacgttgtcgcttgagcagaggatcagctccagatcgggatactgctgcaaaaactcgccgatcctcggcagaatgcagtggcgggcaagggattgcggcatccctaccttgaaccgcccggcgggctgagccgagcgcccgggaaaggaggcttccatcgccgccatctcggccagcagccttttacactcctcataataccggcgaccctccgccgtcacgctgagcttgcgggtggtgcgctggagaagctgcgccccgagccaggcttccagctccttcaccacccgcgataccgtggagcgcggctgcccgagcacctccgccgcgcgggcgaagctgtgggcatccacgaccgcaacatagacctgcatggcatccagtttgtccatttcgttaccccccccccggcgctcattatcccaatattacgaacagtctaacccgaaacgctgtacttatcgaatgtcgaccgtccccctacactgagcctgtagcccgtcaacacaaggcttaactgagcaaggagttaaaatgaaaactgataattttaatcatgcggaaaaggtattggtgctgggagcgggacaactgggcgccgccgttctcgatgcgctggtgcctgcggtaatcgagcgccagggcacggtctcggtcatcgtctcgccggcggcctgggatgaagccggccagctgcggtcggcaaaccatcaggcgctggccgacgccggagccaccttcctcgccgtcgacatcgccggtagcgccatggagacgctggccgatcagtttcgcggattcaccaccgtgattaactgcatggggtttgtcgccggtccggggacacagctgaaaattacccgcgcggtgctggcggccggggtaccccgctattttccctggcagtttggcgtcaattacgatgtggtcggcaaaggcagcggtcagccggtctgggacgagcagtgcgatgtccggaccctgctgcgcgcgcagcgggccacggagtgggtcattgtctccaccgggatgtttaccagctttctcttcgaaccagacttcgatgtagtgaatttatccaaccgaacccttcacgcccttggcagctgggatacccaggtgaccgtcacctcaccggcggatattggccgcctgaccacggcgatttatctgcatcagccgcggatcgtcaacgaggtggtgtttgttgccggtgaaacgacctcttaccggcagttggcggataccgtggagcgcgtaacgcagcagacgttcagcaaagccgtccacacccagcccgccctgctggagcagctgcggacaaacccggatgacgccatgctgcgctatcgcgccgccttcgcccggggggatggcgtgtggtggccgatgggcgacacctggaatgcccgccaccagctgccgacccaggacattgccggctggctgcagaccgcgcgctgattttctctcacaggacagaatgacgatgaacaagttaattccactgatcgtattgagttgtctgctgcccctggcggcaaatgccagaaccatcaccgccaccggcgataccctggaccatgcggagagcaaaatccgccagcaagccgcccgcgagggcgcgactacctatcgcatcactgaagcgcgaatgggcaacaaagtgcatatcacggcgaaaatcgcggactaaagcaccggcgtcaggctcagggatgagctgccggcagcccgcgcgccaggtcaggcgctcattttttcccgtcgacgatcgcggcccggcggcgcgccatacaggcgagcgtattcccgggtgaactgcgacacgctgatatagcccacctccccggcagcctgcgcaatactcatcccttccgccagcatcaggcggcgggcgtggatcaggcgtaactgcttctgaaactgcagcggcgacagcgtggtcatggcgcggaaatgacggtgaaagacagagacgctcatcccggcggcgtcggccagcgcgtcgacgctgactggctgcataaaatcccggcgcagcatcgccaccgcccgacggatccgcgccgaatggctgtctacggcgcccagcgcccggatggccggcccatggacactctgcaacagccagtaatgcagctcccgccgcagaccttcccccagcaccgccagcgcccccggttgatcaaacagccttgccagccggtaagcggcatccgtcacatcggcgttcatcggttcgataccaacgcggggcgcctcatccggccctgacggcccggcctcctgcagctcgcgcaggatagccaggtccagctccagcaccagcgcgtaatagggaaaacgctgactggcctcggtgatctggctggtagtgggaacatccgcggcaatcaccatcgcctcgcccggaccatagtcaaagctggccaggccggtggtcacgctcttacgcccctggagcagcatggccaccagcggcctggcgatagccgcctgcaggtcaccaggatgcagggcccgcaccagagttataccgggaaccggggtaactgccaccccgctgctatcgacatgagcatcggcaaaccggcggcagagatcgaacagggcgtcgcgcataagatcctttcaggcaagttttaaagcctgagtatgcgctatttcccggcaaaagggagcgaacggagagaaatgggcaaaaaataacaaggattgggcaacccggcccggtgagcctctcctattgtaaggactccacacaccagagaggaccgaacatgactaagattgcacttattaccggcgccaaccgcggccttggccgtcagaccgcactggatatcgcccgccagggtggggatgtcatcgtcacctaccgcggcagtctcgaacaggcggaagcggtggtcgccgacatccgcgccctgggccgcaaggccatcgccctgccgctggatatggcgcaaaccgccagcttcccggccttcgccgacagcctcggcagcgcgctggccagcgtctgggggcgggccactttcgaccacctgatcaataacgcagggcacggcgaattcgccccgctggccgaaacgcgcgaagcgcagttcgacgggctgtttaacgtccatgttaagggggtatttttcctcgtacaaaccctgctgccgctgctggcagacggcgggcggatcgttaacttttcctccgggctgacccgcgtctcctatcctggcttctccgcctacgccgccgccaaagcggctgtggagatgctgagcgtgtacatggcccgcgagctgggcgggcgcggcatcaccgtcaataccatcgcccccggcgctatcgccaccgattttggcggtgggctggtgcgggacgacgcagaggtaaacgcgcagtttgccgccatgacggcgctgggacgggtgggcgttcccgaggatattgggccgatgatcgccagcctgctacgcgacgataaccgctgggtgaccgcccagcggatcgaggtgtcgggcggacaaaccatctgacgactcaggctggcaggatgcgctccagcgccaggcctgccagccgcacggtctccagaagacgcggcagactatccccttcccgcgctttcgccgacaggccaagcatcagcgtatccatatagtcagtcacccgcagcgcgtcctgtgggcgatggcgggcgatatactgctggattttggctcttgccgcagcatgccattcgcctgccgccacccgggcatcagcatcctgagaatgtaccccctccagcaccaggcaaccggcggcggccggatcggccacatagcggcgagccgcctcctgcagtacggcgatgagcgacgccgccaccggctggtcgtctcgcaacagggcatcgatgggaatggccccggtctggctgtagcgctgcaggacgcgggtatacagcccgagcttgctgccaaaagcggcataaaagctcggggggttgatgccgaaagcctgggtcagatcggccacgctcaccgcgtcgtagcctcgcgcgtggaagaggcgttgcgccgtttcaatggcctgttccgcatcaaactggcggggacgtcccggagtacgcccttgttttgtagtggtcactatattaatccttgacagcttgtttagccgcagcatattgtaatcatcactacaatatcatgaggtgcgggatatgacagcgtttcacaacaaatcagtgctggttttaggcgggagtcggggaattggcgcggcgatcgtcaggcgttttgtcgccgatggcgcgtcggtggtgtttagctattccggttcgccgcaagcggccgagcggctggcggcagagaccggcagcacggcggtgcaggcggacagcgccgatcgcgatgcggtgataagcctggtccgcgacagcggcccgctggacgtgttagtggtcaatgccgggatcgcgcttttcggtgacgctctcgagcaggacagcgatgccgtcgatcgcctgttccacatcaatattcacgccccctaccatgcctccgtcgaagcggcgcgccgcatgccggaaggcgggcgcattattgtcatcggctcagtcaatggcgatcgcatgccagtgccgggaatggcggcctatgcgctcagcaaatcggccctgcaggggctggcgcgcggcctggcgcgggattttggcccgcgcggcatcacggtcaacgtcgtccagcccggcccaattgataccgacgccaacccggagaacggcccgatgaaagagctgatgcacagctttatggccattaagcgccatggccgtccggaagaggtggcgggaatggtggcgtggctggccggtccggaggcgtcgtttgtcactggcgccatgcacaccatcgacggagcgtttggcgcctgatacctcagggcggcgatgcgcgctttgcaccgccgccgcgaggacgtcatcgcctgtcagggatcttcaggccaggctgtcgaccgccataaaaaagcgatcttcggtaagcataagccgcgcttccggggactggtgcgccttgcggatcatccagccctcctccggggccaggctcagataaaacacctcccgggagcccgcgccgtcgggcgcctcaagactcagggtcacgatccccttttccacgccatccaacagctgctgcggcacgatattgacgctgcgctcgccgttttgcagacgaatggccgggatatcgtagcggcagatgccgctgttgaggctgtagccaagggtactcaggtcgtggagatggcgggtcgaaatcaccacctcaataccggttccatcaaaccactgacttatctgctgagccagctccgccatctgctgacgaaacctggcgatatccgcggcggccgacccgtcgagggccgctgtccgccgcggattttgctgttgctgcagtttcttaaaaaaactttccctcgctgtcacgttatctccctgtgctgtgatgaaaccggttgggctggatgaagatggttatcgcccgttcgctggttacgaaggttgagggcgaactggcgcgatggccccgccgcaaatgtttgtttttttttacgttacttcgccgcttcaggcctgagccgtagctggttgtgttcggcggcgaaaatgcgcggcttgtccggatccaattcctcacgcgccagcacctgcttccaggtatttctttgtgtgtccggatggcggaacaggccgacaaccgccacgaacgtcgcctccgcttccagcggcatattcagactggcgtcccctccgggaccgatcaccacatcgcgactggcgaggagatcggcggcgagcagaatatccccctcctccagcagttgctggtaaaccagccggtcaaaggtctggcgatctttaagctgatagatgcgcaccaccaccggttcagagagcgaatgattctctctggcatcggtgttgagcgcttcgcgcgcggtaaagtccagatgcagcgtattaattttcttataaaaaacggcgttgaaggcagactttgttccctccgagacgcgctgggtgagtccgcatccgctcaggcaaagcgcaagcaggggcagcagacaggcggttttagtcaaacttatacgtaacacgtcggtttccttgtagaaaggtggcaggctgcaggcccgtataggtacccagctcggtggtaaaggtctgaggaatatcgtcctcactctcgccctcacccacgcccagcacgccgttcataccgagccagaacggctcgtcccccagcggcgggacagccagcagtcgggtcggcgcggtcagggtgatgttggcccggaatcgccagccgaggtatacccgcagcaggatgagaaagtcccgaaacagcgggccgtcaggcttccagccctgcgcctccgcgggattgtcggtggtaagggcaacgaggagctggctgctggcatccatcgcttcgtcacccagcggcgtattgccgtccaggaagaagtcgtcatcgccgtaaaaccccagcggctggctgatcgccaccggacgcaggctgtacgggctcaccctgacggtggtctccggggccagcagggtgaccagcgcctggatcccctgctgggttttgcccggctgacgcagcacgccggttagcgccagaaagcgcgacgccggcgaggcgatatgctgcgtcgtgccggggatgcctagccccgccaggcccagtagcgactgcgagagacgatcggtgccgccgggctcaaaggtggcgggccaggagtatttccgccagatgcggtaaaactgcgtcatgatccggtggctgaagatatccagtaagccctgcagcgcttcatgcccttccctgtgctgggcgatatcatcgagatatgccgtcgggagcggcgaatcgacaccgtacaaccccataaaggtggtgcgaatgaccggcggcctgctgtcatcggcctcatcgtattccacggctttcagttcgctggcgggaaatcccattcccggatgcgggtaaaaacgcaccggatcgtcagccggatggctggttccccccatcagcggttggccgggacgccgtttttccagaagatggcagaagcggtaaaaattgatccgcggcaggtcggcctccagtcgcggggtcagccgggaatgcggcggctgtgcttctcttcccattccagtcgttctccggttggttgcagaatgataatcaggcggttgaacaagtagatgtcggtgtagagcgcgaagaagcggctaagcatctcgccaaacaggcatatatcgcctcgtccggcaaagccgtgactgtcgagggtgacttcaatctgtacgccgcgcaccagatggccctgtgcaaagcgctctgttgcgcggtgcttcacgtcgaggatggcttccagacgccgacgattcatctcgctgtcggtccattcatacagcgccagggtgccgcgcaggacctccgcgttatccatcagggaaagaaaactgctgcccagatggctcagcacccgccagtgaaaacggtcctgggcggggggatagcacggcagcgtcggcgcgcagaggttacgcactgcaatactggcggaagtggttttcatcaccgtatcgagcacggtgctctgcagcgcgcgacgcggcagctggccgttggttccggtgagggtcagcgacaggctttcatcttccggtacggtatgattatcaaaggcttctccgccgacgataagccaggtgttgtacagcccggaggggccacggcgcacccgggtatgatagtaatagtccgccgcgtcatgacgcatcatgccgcctttgtggcgaaaacttgagaacggcgcgtaaacctgctggtgtgaggagatcacggaatcgacggtgtaaatttcggtgtggccgtcctgcacgcgcatcgggcgcagcgggtattcggtctgcagggaattgatggtcagcggatcggactccagcggaaacaggttgatcactggcacgcagtgcaggcgcagctgcttttcgctgaagcggaagtcatgttcccagcgttccgccagcacgacgtcgatttcaaaccacgccagtccggccggaaaagccaccgtctccagcccgcgcagatcgatgaacatgaacttttcgcggaaggtaaaatactccagcagcagttggtaaccgcgaaaactgcggccatcttcaggccagaggccgtcatcctcgccaaatcccagcgcgctgaaatacccgtccagcggccttctgtccacctcatcgggcatgcgcagccacatccgggccacattgagggtaaaggcctcgtgcatggcgcaggccagcggcgcatcggcgttgcagtacagcgggatatgactgagatcgacccggcgccagtccgtcagctggctgcaggtaaagcgcagcgtgatcaccgaccggccatccgtatcggtggccagctggacgcgttccagggataacggctgcagagcgatcgctttggtggtggtgtaccggcagcgcgtgcccttttcaccgatcggccgggaaagcacttcaaagcctttggccatcgtcatcggctctttcatttccggccagtcgggggtgaactccacgaccgacatcgagggaatggtacgtaaataatgtggccacagcagactgaccacgccttcggtcagctcaggcagatcgtcatcgagtttctcgcgcatgcggcccatcaggaaggcaaaaccttcaaacagacgctcgacaaaggggtcgcgagcgcccgctttgtcgagattgagcattgccgcctgctcaggatgagcgcgggcaaactcttcacccgcttccagcaggtagcgcatttcagcgtcgtaataacgcagggttaaatcgtccataaattaatattgatttcctttcaatcatcagattttgaaactggcaactaaaaaaataacctttataacacctgaattaatacttataattaaatgcctttattttttttaaacatttattgcttgaaccatttttaatcgcgcccttaaaaaaatcatcttttatataaatcgatgcgtagcacacgccctcttttgaagaaagaataaaattttgaccaccgctacctgcagcgttatattcgtattgaccacctaccctccaaccaatgtcgagcgctgcatctttcctaatcagagatgtaaacgaagctttaatcttaactctttttccaggtgctataatttcaggctttgatcgtactatacgcgcgacttcgtcaggctcaggttcgacattatatatactctcacctgcatatacgaatatagtttcgttagtgttatttataataacaacgactggccttatcggaataaaatgagcgacaaggactaacaccgctataaataatgcaatacccgttaacgtttttgtttttttcaaaatgattcgtcacttttttctgggttatctgtattccagcaccaatgattttctcttgagtgaggaaggtgcgcgccaggtgttgtttctaaaacgcaaagaatattatctgccgtcaacgtctcagcaaatttcccatgttcataaaatagattaaaccctattttcatgctagtaatgtcatccatggtatcatcccccatggcacctggcgtcatgttttgttcccaagtggaccctttcaagagaattgcttcagaaaaaccgacactacgtccaacataaccataatgtatgtttgaccaaacatcataaaaataatcatgctgtttaaacttatgataataagactttgatgattttcctttcctgggaagtggtcgtgctactgcaacggatgaaaaaaaatcgcggatcttcggtttatgatcccagattgaacctgttttcacggtctgataccaaatagccattgcagcaagtaaatctgctttagggggcggccccagccttgcataaaagggaagtttattccattcagtaagtctttttattataaaatcttcgtcgattaaatatcgtattgtttctgccgtatcgcttctgacattcgcctttatttcacttagtatatattctgcaactttaatcgccccatctgtgtgagtacactgtcgttcagtcttattatctggatgaagattcttatagggttcctgtaaagatgccataagcccatcgagtgaaaataaagtagttatgcattcacctcctttctcataagtatcattcatcattgatggaataaacttcgccttacaggggcaagtactacagctgtcgagggttccggccattcgccggccatgaatggtatcgttgtcgatgccaccggcaatcttgtatagccctgcgtgctttccgcaagtgacgctgtcctgctcccgggcaacaggtttatcaaacagagtgtgatcttctgcgcctgtagtgattcttccgccgcaggtcgttctgtctccctgtaccagataaaaaccttttgctgccatatgttctccttagtgtcagtttccgttctgttagccgcaaagcaccgcgctactggctggatcgagcgcaatcagacctgccagcaattgatccatctccggttgcaatcgtaacttttcactctcgctgcgcgtggctttcatgcgcagtagcctgagccgtcgcgatttaatctcgaacaacagggctgggatccactgcgtgagggtgattgatcccgccgcatcgtcgagttctcgcagaagatagagcgcgaggtcattcttccccttttgttcggccacgcgggccatcagcaggcgcaacagccatttttctttagtggattcagtgcccgggcgcgtctgaatccagtggagtgcagcatcgagaccgtcagtgtcagccttctcgagcgcttcaggttcaagggccagaatgtcgttatcagcgccgctggcagccgatactggctcatcctgccagacggacatatcgtcgagtacactctgatttatccagttcagcgtgacctcatcggcaaagggtgtgccgtcgttaaaagctaatgtttcaagcccggtgagacggcgcagcaatcctttcagatcggcaattataatatcggccagcacatcctgacccgacctcaccagcgcctgatggatataccattgcaggtcaagccagaggtggttagcgccacgtgagaaggtactgtccgcctgttccagtatctccgaccagctctgttgcaggtacagccgcttgagcatggcacgctgatctgctctgggaggctcgatacgtgtttttccttcagcatcaggcgcagggatgattgtcaaggtgtcatgacgaaggcttttcattagccgatgtgcggcaagccagccatcgggttgaacacgcagatatgctgtcagggttcgcgcctgggccagcagatcctgaccggaggtgatgttactgagaaccggcgcttcgtattcagccatgcgtgaagcggtttgagccagcccccggtttccgacgttctgcggcaccaccgcatcgactcccccgccctttatcaaacgagactccagagcaccccagagtgcttgcagatctggccgtgatgtttctggttctgtcgtcagacaatcatcaatgagaagcagcgcgccgacggtacgccttgcgtcctcccgcacaacttctggaaaaagtgaaagactgtctaagatacgagtacccgccagccactcgagggctgctttgcggctacggtcgcgctgcggataaagctgcataccatatcgttgcagcaagcctgccagcagctccagcccatcggccaagccagcttccccgtcctggtgcaaacgggcccagcagtaataggtaacaatccggatatcttttgttgttgccagtaactgtccagccaactggcaaatcagttcggtatcgacaccggagatcttattgacctcctcgcggatacgctgaaaatcatcgtcatagcccggatcgctcccggtgggctggctatcactgattggcgcaagccaggactgccactgcgcctgacgtgaccgggcctgctggcgcagtacgctttcatccaactgactggcggcaaccaaattttgtaaaatactcataattccatctcatccatgtcactattccctacccccgtcgtcaggacctgtgcgctctcagccgcatcgacagtaaaaatctgatccggcagggtcaatccgcgcagcgccagaagcgccagcgggccactcccaagctgggagcgcaatacccactgcagggtgcggccatccggagcggagaagctcatcatccactggctgcgatccagcggatggcgtttaccctgctccagccagcgaataaaaccccaggtaccgctgtagtcaccgaacaggcgcgtgcccgcattgacggtggtccaggtaagcagagtgccgggtttatacgtctcccccggccagcggaaagtctgccagtcggccatctgattgaaatagcgcagcttttggccgtctatcgtcagctgtgtctcgacaacctccggggcaggcctggcctgtaactcaaagctgatcccctggctgccgtcggtgaaaagaatgtcggacagctggcttagctggttgatcgcgcgcagaaaggccggattaaagaccaggccgtgactgttgaccttatccggcacccattgactgccttctttatgcaggacaccgttcagctccgtcgtgagaaaacgttcgattcgcccgctgtctttgcgcacaaactcagccagcatcggcagggaggcgtcgcttttgctggcggcaaacggaaagcgtccgtcaaaggcggtgtgccagttggcgaccaccgagcggcgccatttatcattcagactggccgccgacggcagaagcacggtttcccaggcctgagtcagcggctgcacaaacagagtattaccgaagccactccactcttcgccaaggcttgccgaaatcaggctaccgtactgttgcgtgtcggtcaggtcgacgcttttcccctggaagacggtctgcgccagggtctgcatcatctcctgcggatcggaagcattcgcaacctgctgcaggcgcaggcgcacgcgggtgatacgggtcagataggtttgcaggctcagggtgctatcggccgacatgacgttgctgcccgtgtttttccccatcagctggagcagtgggccgaacgtgtcatccagaggcccctgcgggcccgcggccgactggtcgatgaccggcttgtctttcccgcccaccagatctttggccgatttaataaggctgtccgacagcccctccctttgttgccccgcctgcccctgccaggcaagggtattcatcagggcaatcagcggcgactggcggacatcgctaatcagcgtgagctggtcggtaacatcggcgatattggtcgccggattaagtcgcagactgttgagaaaattcagccagctgccggcgaaatcggtgaagtagcgtcgggtcagacgcgctttcagcgcctccggcgacaggtctgtcgacaccgttttgcgcgaatcgctcagcacccagtcgatttcctcccggcgcgagctggctgccttatcaatggcctgctgaatgccgccttcccatgcctggcgggtaaacatccccgggaccacttcatcggtggtaaacaggcggcgcgcgtcggtgccactggtcatgtcttccagcgacacatcggcaaaattacgacgcacggatttgagcatgttctcatataaggtgctttcggcattgcggcgacctagctgctgcaacagaacctgacggctctgactcacccgttgcgcatccgggatgatcttccactctggccgctcgggcagcagggagagataaaaggcccacaaatccggcgccagactttgccacagaccggtcgagatccccattcgcgtcggctggaccgttttcatggtctgcgcaaaaaatgcgccatcggctttatccggacgagccatcatcagccaggctttcagctggtcatagcccggtttcgccagctgggctcgttggtcgctattgggggcggagttgaccagcgcgctgagcgcctgctgcaacgcggcattggccgggtcacgtatcaggcgatgattcgccacaccgtaccagggcaggacggcgtctaatagttgctgatgatggtccagaccaaagcgccgataccagggagcgccattctgcccatcgtgcacgagacggccggcctcattgcgcagggcatggagggccgtcagttgatagtcagaaacggaggggtgggccaccaggtcgcgggcttttcccgctaccgaagcaatctgactgtaattgagggcaaaggagagcagcagtcccgccgcccacaggccgaagatggccagcagaccgcacgccaggccccgctcccatgccattcccacgtgatgcccgcgtaaacggcggcagtcatcgacgatcccctgccaggtggcgggcagcgtcaggaggtgaggctggctcgcaggcagggcatcagcttcctgatacggatctacggtacgaggctctggcaggctaaacatcaggcctcgcagcgcaagccgctgccgcgaggcggtcagccacggcgccagctgccggcgccattgtgcgatctccccgtcgataagctgctgccccagacgcagcaggaagtcgtggcgggtatctgctgcgatctggtgcatcccctgctcccgtagcgtcggcaacatctgcgcaagctgacgggcgacatcttcctcagtggcgcgcaacgggaagctaacccctaccgcctgcacctcgcggtcagcctgcggccactcactgtcgcacagtttccataaccagaccggggcggcatagcccagcagttcgctgattttttccagcccgtgcaggtcgctctcgcttatctgcggcgtcagggtgagagacgacggcatcacccgcacaatcccgtccagaggacggccacggcgcagcttgcgcagcgcgatgtatttttctcggtcaggctccgatgcaaggctgccgccgtaaatcagcacggtgcggttgccttcaagccagtgctgctgacgcaggccaggcaccagctgttcgattgccgcctcgtcgccggtgactaaaagcaggcggactttgcgccgccagtgaattccaattcgggttcgcagatggtcacgaatcctggcacacatcaccactgctggagaaacagagatgttttcactctcatcttttctcttattgtcatcaccacgagtgacatccaggagcgcctcaaactcctttttaccggcactgcgagctgtccacaggagcataactaacatgataaagatacatccggtaatgcagcacccaccaataagccagtaattctgctgctgactatcgccctcaagtccggccatgtcaggatgtttccagacgataaatgtcattgcagccaagagtaaaaagagaatgaatacgactgaaagatagcgaccttccgtagttttcggtgctaaaagtaacttcacagatccatctcctgtcttgaagctatcggggtaataagcgtgctccatagcactttctgagtggtatccccgcagataatcatctgcggggaatgtgtttgtcgggcgatttcagtggcggcagcaatagccagccaaggtgcagcggctccagcattccccatggatatatcgagtgaaatgacagcctcatcttttacgcactgcgcaggatgtgcattctgacatccaatcgcttctgcacgttgctcacctgtcattccagcgagccataaatttttcaccatactttcttttagcgggacgttccaggcggccatcctcatcccttcgctaagttcacctgagggagcagcatctggccggtgtagtaatgcgagggggtcaagcgcctcttgcgttaggcggttgccaagaagtagagcaacagccgcttcagcagtattgtttgtaacaaccggatcaatctggaggccaacgatcaataacattgctttatctttaatacgttcatttaaccagcggtcaattacactaagaccacgcccttcaacgtgttcaacaggaaaagtgatattgttcttttgccatgcctcatcccagtaatggcgaatgttctccaaaggcagcgatgttgttacatcaaaaactactactagtgggcatttatcagggatttgtgtaaaaggaatgtctgcaatcatctgcgaaaaaatattcattatcacgaattccatagaatcctgcgggctggaagaaatttggctcattctggcgctttcattaccatcccggccgacctgtgaaacaataatgctgtcgttgttttgcatagcaatagcggtatctttctgagcaactgatgagtggccggtaataaatgttgcactcagcacttgtaatgcacgccgtgccttacgggtttctcgaagaatccactgttctcgctgtttgtcaaaagcgtttgctttgctatcctgtaaagaccaaacaagcagacgagaagaaagcaagacactccacaaagcaacaggaaaacctaaagctaatctccagaagtacagattttcaacataacgcccaaatatacgcattatgataatactgactgaaagcatgacaaccagagcaacaagccaacgaaaaaatttcagaggcttaggtctggggtagcgttctggcaaatgtttaagtgtatatggcattaatttcctcatattacaggatggctaaattagcttgatatgcaggcgaaacaaaaactcaccacattatatttctttcattagcaaactcacacttaaacatacgaccatcctttttggtaaaaaacagaaatcaacgtgctagtttacttttgtcgttgaagtggccttccatttttttcagcatgtaatttaacagagacttgtcttttttaattataatcaggaatcggagggttttctccaccccacctaccgttttcaactatgatattctcttcccctcgtagggcatatttcaatccattttatacgcgaaatagttgacagtaactgggtctatcccaccaatacatccaatttataaccaaataaaacagtgccttcgtcattggtaaagctactgtttatttcaactgattcttttaccccccattcagattaatatccatttcacagtcaataatataatcatttgaaatgcaatcatccttaccctttgtcacctgttttacagataaatactctgcagtattattctggttgatttcctttttcatcaccagtaaatgcttaccagaattaccttcccactttgtagaaaagattggatttttagtaaaaatagagtttattggctacaaaataatatgcaacacaacctaaaaagcagcaagagcgctgaataatgattaatcaacaacacccttaatttagggcgagatgcttacatcaatactcacaagctatttttgcagcataaatttattggcagctttgcaagctaaagttccgtcgggaagagaatcaaacaaagaggtaaagttatatagaactgttttcccattaactttcttaaattcaataaaatacccataagcaccatcatcatcacatttttttctaatagactctggtagtgcaaaagatacattccatacacacactttttcatttgggaaaactgccgatgtgttaacaggatactttgattttttgtccactccccagccatagtaaacctcagatacattgacaagtgtactgtatttatttttgataagtaaatcactttcaacataacgcctcatttcttttgaagacatttcaatcaacaacttcttattattttttttgaaaacctctcttagagaatctatatttgagttatccatacactcttctgccagtacacatgagctgtaaccaagtaacaatgctaaaacataataatacttcacatcacctccagtattaaatttttttatcaccttgttcttccatcctctttcgagagtagattggctccaaggctttcacgcaactctgcaatattagaaatcgctgcttctctcgagcccgaatttattattttttgtgcataagaataatatgaattaggtacatagaacctgaccctggcccaaaatcagtgcagtgctaaatcagagatcttcgtctttccggagatttcggatgaattcagccggagtcatgtcatttaatgatgaatgcgttctctcatgattatattccctgcgccagttgtcgagtttgtcctgcgcatcttccagcgagagaaaccagtgaatgttcaggcattcatcccgcagactgccgttcaatgattcaataaacgggttatccgttggttttccggggcgggagaagtccattgtaacaccgtgctgatacgcccatttatccagacttttcgagataaactcgctgccgttatctgtctgaatacgtaccggcaggcgcttgcccagcacccgcaacctttccatcacaccgaccacatcctcacctttcagcgactttccggcatggatcgccacacactcccgactaaaattatccactacagtcagcgcccggaaacgtcgtccgttaaacaggttatccgacacgaaatccatactccagcactgatcgactccgctcaggaccggacgttgctgacgatgtgctgcactgacatgcctgcgggggcgctttttgcgcaggttgaggccttccagacagtaaatccggtgtgttttcttgtggttaacaggccagccttcccgccgcagctgaatatgaatacgcgggcaaccgtagcggatccgggtttccgctatttcccggatacgcagggttatcgcccgatcatcccgccggctctgccagtggtaaacggttctgctctgcatcagcagtccgcatccccgtcggacactgatacggtaagcctcccgcagaaaatgcaccgcctgacgcttctgagccggcctcagaactttttttgataacttcctgagcatcaccttgtccagacttaaatcagccaccagacgtttcagacgctgattctcttcctcaagctggcgcaggcggcgcagttttgtcacgcccatgccgccaaactttttcttccagttgtaaaatgtggcttcagaaatgcccatctttctgcagacttcctccacccgagtgccggttgcggcctgtttcagcgcaaatgctatctgttcttcggtatagcgggtctttttcatggcgatgtgcctctctgtgagatggaggaaagaccggagacttcagtttagcctgacactgttttcagggaggagatcaaaggttaagcgggatacttacagagaacatttccccagcaatggcacttgaaaaacacagcatacatatgattaatgaaaagtatctaaacaaagctactgacctcaatatcattaaggactggaagggagtatctttgatcttatagactggcaaatggaccttcctaaaagcttatagctaataattccatcaacattcaactcattcgtaaagatatgcccaggggcttttgagtcgaacgtataaataaataacttattatctttcattgcataaaaaagaactccatcgaaaccagaaacttgatcatcagagtaagatgataatattttggcaatctgagttctggatgataaatctgttatggattttattagtatattgtcatcaataccttttgggagcgtattcaaatatacgttatcaatataaggggtataatcattttgatcgcacgaaggagtgtgaggattgtccacaccgtaataatttctaaaaaagccatcaaggacatatttataatcatttgcagaaggcaatgcctttacaagtaaggatattcctccgggatcacctgctatcactctcaatgacaacaacagtaacatacttatagctataaaatttttcatcgaccgccaccttcatctttcacagatttagttttgctatcaaatccgaaaaaattattgattttactgagggttgataatccatgcttatcctcatgagaaagtatgattgggatcaattgctaatgattcacgagaaaattttttgcgctgatagtaaatagccatttgaaaaagcatcatttcatattgataagctccccccccaattcatcaagtgttttctctcccgagaaaagctgtcggcatttactgtcaattacagcatcatctttatctcttgggaatataattttcatttttcttgctatatcccacacacctgggaatgaatcaaccgcacaatccaaatcgtttggcgcaatatattctccaatgacagatattttccctagatatattgaaccaccagggtaaaacaagctattctgatctggctcagatgaggaattactccaaaaacctttgcctgacaaaaggtttttattcccattaaacttagatactatcgcctgatatgacctaaagtgagcatcaatcacaactaatgccagaactaattttttttcaaaattaacatctataatagaagaaattgaattattaaagtaatgaatagaatgaattcgaattgactgtcctttgcaatctataagctccttaacatcaagatatttatttcctgatgctaaaagcacgcctaaatgatcactagttagagaaatacctccagcaccagagattaatgaatcattccaattttctattttgcatgagtaatccgtatttaattgatcatcgtgaacatttacatatccagctttatccttatctaaatggatgcttacaccatcgatatcaattgtgttgtaatatccagcccaagaattaagagcagtagcacaaagcatcataaacaaaaatgaattagttttaaacttcatcatcaatcatctcttttgcttttttagtagctattttcctttctgcaattcctttatctgcaccatttatatttttagttactttcaaaataatgctgtcatcatcagatttcccaattttgtcctcatccataattttgagaactttagacttaaaacaaactataaaaaaaccacctgtatcaatacagttatatgcattttctgtaactttctgagggtttcctatttttggtggttttttcttcataccggctgaatttttttcttgtactccgggtcatcccaccaatatttatcaaagtcattttttgacaaccaacctcgatatacccagtagcttgaatatgtgttaagtccagttagcattttaaaccctctacctctgaatttttgtgcatctacatctccacagttaccgttaatccagctataggatcctgtgatataccctccacgggaattgtattttttcccggagaaatagttatccttctcggctttaagagctccgtaccaatgacctagcttagtagtttcattaaatgttgatgcttcaacaatcacaccaccttgctgaacaccatcaacaataatttgttgctggctagtttcttgcatggacaataaataacctgattcaactgcaccctgccctaaaaaatgacaaattctatttgcatcagataagttatactttcgcatgattgtatttatgtccgcatagtactctaatgtaatatttttaataccttcaagtgcatttttattttttttactagcattcgccgtcattactttttcaattacttcagagtcgagccaactacatttcctgaaatgtcgaataaatgattttggctcaaaatgccacaaccggtcagaactcaacgctccagaatcaaagcatagtgcttccgcatgggatttaaactttgcataatcggcttccgtcatcggttcatgctcttcatttcccgttttcagccacgaaaaacggatgtcgatcgtacttttttcccattcaaatgggaaatgacagattagcttcccgcactggttatcgaagtcaccaacttcatgaagtttcttgataatagctgaattacactggctgttgctatcactatcgtcatctaccatctgccagcccgtccagtgagggaaatcagcgtcactaaactttttaatactggaatcagcaaggttgatcacccctttaccacccgggtaattgactgtcatccataatggtgcgtctgccggtaccagtgtttcatggtccgtgttgatcactcgcccaaagcgaagtaattcaaacccggcacttgggctctccttataattccgcatcgcggttttatagagattgtattcgtagtcatcaccatctgcattaaccagtggttcacccagcagatcatattttccgtcagtctgcgtatttttctgacgagtaaccatcgtgcacttgccttgggccagagtcatgctggcatacagaggcacattgctggtatatagttcagaaagtccggtggtagaaatgctgttatctgctggagccttgtcataaaactttgtctgcggtggcagataaaagtgaatatcaccataaaccgcatcggtgcggccattcttcgaaatatccagctctcctgttttcctgcccgttagcttgctgatgttgtcatcatcgcagaaaatctggaaatggaaagcattcactccatcaaccatgcctggaaggcctataggatccttacggtaaactttatcaccggctttaacagtttcagccagcgacttcagatgcatgtataaggaatagaaagccacttttccttcatcaccgctaccgatctcggtttcatgctttatgagcacataaccatcattactcccctttgtattgggtttatcggcgttgatgttgaatggtgctagatcgcgcttgtctgagcttttgcggagtgaaacgacggtaccgtcagctatcgcccgcacgctctcagcaggccttccaagatgttattacctgtttatttctgaatattaatctcatattgtttttcaaaatattgccccgcactagcaacaaccccgcccctaatattaattgttacaatcccttgcaactgaggcttaccttctatagtaaaattattatatacatattttgtgtaatattttttttcagaaaatagtaatttcaatccagaatttgatgggtgaatttcataactcagatcaacaactggtcctgtacctccagagatggtgattggaacataatattcctgatctatatatccatctggtaacttattaggctcaaatacaaggtgattgccacagccagttagaaagaaagaaattacaaaagctcttacatagtgattcatttttaatcatgatatttttgtaaataccatccccccaaaagtatggtttagaaattctcctaattttaatgatactcgaagcgagttatctttaacttcaccccatgaaaaaagtctcagcgagacaagctcttctaaactcgtttcgttagtgattatccagattaaattccttcctcaattttcaaaaaactccatctctaaattaccagggataagatctttcgattatttcgtcaggcttttaggattacggtaaaaaaacctggtgttacttgtgcccaccttgacatacccactcttttaaaaccactcgatatcacccctccaaattgtaataccggcgaccacattgtctactttaatatcattaaagacatgatctaaaataaattcaatcaacatttatttgatattttttagtaaacacctgtgattttgaatacatagatgcatatgtttttgcaactatttcaacggttatcacaccttttattctgggcactccacttattacaagttcgttagggctgctacctttgttaaagtcatttttttcattccccataaagcttggttctatatccagaccggaattatcaggagttaattttgctctaaaattacttgaaataaaagaaataacctctccactcccctgaaatctcataaccaaaccttgctgataaaacgtccctatcttggcatttttcaaccgcccccacttggataaaactctattttacctgaagagcaggatgctaaaaaaacaaacaaacagattagatattttatcataaaactattctagtgatttaaacaccacccctccaaaaatgcttcccattacatctgaaagagcaagatgcctcttaatctgattttttaccttaccccaagagaataatttcaattgaactaactcattttccttagtcgttaatgaaatgacctcaccatactgtgtggttataggtccatcccaaacaatccaatgattcttagccgtgacagtggagtcaaatccatcaagtataccagctgatatcaaagtaacaactcgacaaccttttctaatatactcattgagggtacttagttctttcagatttacgtgcgatagcccgacattactaaactctttttgataaccagcacttacaaaccattcagtaagcgctccccataatgttatccctgaagcctggtcatcaatttcgtcataactcataatggaattttcggagtcccttaaagaagcgagggttatccaatcgatccccttcactcgttctccataagcatcatagaaagcccccataggatgccgacaactattgcttggaactatatttaacgcacctattttagttttcccatacaaccaaagctcattaactgcttgtttataaatatcaggtctatccattaacaggcaataaaaaaatgatgctggcccacacaaactagtatccccttgatttggataactactgcgattcatcctcgaaaggatctgatgttctatcttatttttatcgaagggatcatcaggactacctacaggatactcttttgcaataaacgctcttttctgacaggtaatctgcacagtatgtatattatcctcacccttatcattaaccggttttgtctgcgcctttgtctcaaaataacaaacattttcacgcttatttttagaatatgcttgccctgatgccatttcaccaagtgtgtacatctttttcgcaggcgaggaaagcacagaaaacaacttacctccgtgcttgcgatataagttcatttccattatgtagattacagacaacccatcctctgtgtcattcgtttcatgggactgagtttgataatttgatgttactggttgttgcgccactgacagtagtatatgttttttattactggcatcagttctgtaaacattcagatcgtaaaaaaggtcgactgctgaaacattcgattcaatctttgtataaatattatatttaggcattgatggcctccggtatcatatgcagcagaacatcctgtacctgtgcagaagtaaacaacttcgtatacccctcgccatcactgacaccctctaataccgagccatcagccagaaaggccctgtaaggtgtattcagcatcggcatcccattatcatctgtacacaggtagcgaatattatggctgtcgtcatttatcgcattagctaaaggtgcaatgtcaggcttatgctgcgctttttcccgcctgacgtaatacccggcccttgttctgtactcacctgccgtcgctgattcaatgccactggcattgagcgtgatataacttcccccgccgtttatcgtgacccgttttttcgcaataatttcgatactgtcttccgtgctgacaatgctgatttccttccgggcaagcagcgccatcaggtcattctgcgcctgcatctgtaccggtccctggttcgctatcagcctgatcccaagctttcgcacaaacacgctcagcgcactgcccaccccgatgaacaggtttttcaccacgctgacatccgcattctttccggccgtggcaatcaggttatgcccggctgagacctgcagatgctccccgctggtcagcgctatcccctccggcgcgctgaccagcagcaccgattttttgaggtccgtcagctgctgctccagcagggtaatttgcgcctggagatcggccgggttcgcggtcgccttctgcgcgtcaccggagatggacatcatctgctcccgggcttcagccagattgctgaccgccggctccatcgccagcacctgcccctgagcctgcacctgcccgtcagcgctgataaaaatacccttctgtgcccggatagctccccaactgtcggttctcagctcaaagccttcgccgcgcggccgcctgtcactgtccaccaggtgccccagattcagctggctcttaccgccgtactccgtcaagagcttgatatgctcttttccgcgctcatcgtcgaggcggattttgttgttggccggggtgcgcaggacgttacgtttgtcattgcaaatggtgacgtggtcgccgtgcgccgagtcgtgcagcacgcccgcgatatacggccggtcagggttaccatcctcaaagccaatcgccacctccgtccccgccagcagcggcaggtgcaggccgtaagtctctccggcatacggccgcgactgacggacccacaggctctcgaacccggtttcccagcgcgcccggtcaaacagcatattcacccggtagcgtccgtgtttgtcgatatgcccgtaggtgtcgttttcccgggtgctggtcacgcgggccggcagcgtcccggccatcaccggacgcgcgccgggctcaggccggtagccgacgtccgggctgtccggtatgccggcaaactccaccgcaaagtcggcatcgcgccgggcgtggctgtgcatcgccgtgatgagcacgccatcagcaaactccccgaccacctcctctccgccggtgaccttcagcacctgtcccgggcagagcgtcgggcagctggtggtggcctgcatccgggtctggccgttaagataacgctcatgccgaagccgggcgtaaaacgccccggactccggcgccggatggcggtcatgggcattccccgcggtcaggtagttatctccccagtggtaagcctcaccaaaggtggtggtctccccgcgggtgacatccacctgcgcgttcatgtccgccgtcgcctcgcggtagttgtagtcgcgggtactgacctgctgctccacgacgcggtggcggcatgccatctcccacaccgcgtccaccccggccgactgctgccctgacggcgggaccgaaggcaacgtcagccccttctcatagccctgctgactgtcgcagaactcagcgacgtcgatgtgcagccgcgtgtcggcggtaaaccgaaaccagatccccacatcacccagcagccgggtgataaagcgcaggtcatcctcgccgtactgcatcacctgctcgcggcgcggatacgtttttgtcagcgagaacagaaaatcctgaccgcgcaggccgtggcgctcgcggaggattttttccacaatctgcggaacggactggtcctggtaaatggcgttctggtgcgagcggttaagcagcgccaggcgcggctgaagcgtcagcgcgtagtgcgtttcatccctggaggtactgagccgttcaaaccccgtcaccacgccctggatcacccgcacgggttgctgaacattgatgccgaagccctgagccaccggcgcctgcagcgtcagggaggctgccttcatcagcatcatctctttgctgatggcatggtctgcgctggtgaattcaatacggtagcggaacggctggctcagggcttcatcgccctcgaaggccagcacatcaagcccggcttcacatcccttcaccgaaagcaggtggtggttgtggctgaacaacaacgatttcacgctactcatcggcgattgccccctcgtcaaacgccatcacgacgccttcctcttcgtgataccccagcgtcacctggcgcggtttctgccccgccgccatatggctcaatagctgctgactcagcgccggcaggatctgctgattcagcagactgtcgacgttgcgggcgccggtatccggcagcaggcaggcctcggttagcgcgtcgaacaggctctcgctgagggtggtggtgattccgtaatggcaagccagacgctgacttacctgcccgagcttcatgccgacaatggcgcgcagcgctcccgccggcagcggacggtaaatcaccgtctggaagcgggccagcagcgccggctggaagtggccgcgcagcaccgggcgcagcagctcgtgcaggtctgattcgctggcctccggctgttcatccagcagctgcatcaggaggtcgctaccgaggttggcggtcatcaggatcacggtgttgcgaaagtcgatttcacgcccctcgccgtcgcgcattaccccccggtcgaagacctggtagaacaggttcatcacatcgcgatgggccttttccacctcatcgagcagcaccacgctgtaggggcgtttgcgcaccgcctcggtcaggatcccgccctggccgtagccgacgtagcccggcggagaacccttcagctggctgacggtgtgcggctcctggtactcggagagattgatggtgatcagcgctttctcgccgccgaacagcgcatcggccagggcgagcgccgtttccgttttgccggtgccgctcggcccgaccagcaggaacaccccttgcggaccgttctccggcgtcaggccggttttcgcggcgcgcaggcgccgggcaatagcgctcagggccgcctcctggccaaccacccgtttgccgagactctcttccagactcagcagctccgtctgctcatctttcattagcgaggagagcggcacgccggtccagtcggcaatcaccgtcgccacggtgcggacgtcgacgtccagcccgagcagcggattgccctgctggacggcgataagcgcggtttgtagatcgctaatttccgcctggcgggagatatcgcggcgacaggcgagcagcgcttccgtcagctgcagctcctgaccatactgagtttcaagggtatccagcgccagaataaggcggatctcctcctgctcaatggccgccagccgatcgccgcgggcgctgttgcccagcgcaatatcttccagcagcgcctgcttctccattgccagcgcggtgagctgcgccttcatgcgggtcagcggctcaggcacggtatccaaactcatacgcaggcgggcggaagcggtgtcgagtaaatccactgccttgtccggcagctggcgaccggtgagatagcgtcgtgacagcgtcacggcggcgcgcaccgcatcatccgtgatatgcacgccgtggtggtcggcatagcgggacttcaggccgcgcagcatcaggcaggcggtgtcgtcgtccggctcatccaccttgaccatctgaaagcggcgctccagcgcggcgtcgcgctcgaagtactgcttgtattcactccaggtggtggcggcgatggtccgcagttcgccccgggccagcgccggcttcagcaggttggcggcatccgcgccgcccgcctgattacccgcgccgatgatcgtgtgcgcctcgtcgataaacagcagcaccggcgaaggcgactgctgtaccgcctcaatgatatttttcagccgctgctcgaactcgcctttgaccccggcgccggcctgcagcagaccgaggtcaagggtgcgcaccgacactggcttcagcgcgtcggggacgttgccttcggcaatgcgcagcgccaggccttccaccagagcggtcttgcccacgcccggctcaccgacgaggatcgggttgtttttacgtcgacgggagagaatatccaccatctggcggatttccgtgtcgcgtccgaacaccgggtcaatctggccgtctctggctttggcggtgacgtcgagagtgaatttgtccagcgcgctctgcagcgccggattgagcccatccgcattcagttcgctgcacgcaggacgccccacaaattccacgtccccgccatggggctgcgccagcgccgcttcctgctgcgctggcggacgttcgtcggactgggcatcaagcaaggggcgcaggcgttccagctgacgctggcccagcgttaacagcggccacaggccatggcactggatcagattctgtttttcaaccagcgccatcagcaggtgaacactgcggatctgcgcttcgccgctgagcgaggcaatcagccaggcctcctgcatcagcctcagggtatggtcagagagctggggacgatgacgtaccgagcgcggctgtttatccagccagctcagcagatcctgccacagcgcatccatatcccattcatagcgccgcgccagcaccgtcagatcgccttccccctgttccagcagcttgagcagccagtgctcgggcaggatctcggcatgcgcccgggtctggcacagggaggccgccccctccattgcgcgggcacagcagggattaagacggcgtaacaggctggctggattttccatgagatcctctcttattggttccggacacgctaccgcccgtcgctgttcccgaacaggaaccccaagcgcacaaggtcaggcagacagattgtgtttttctttgctgagaacccgtacctcaggcgctcagcaaaaaacggcgggcagagaaacgctgcccgcatcaggcgatcgcccgcaataatccccggccgcagagataacgatgcggccgggatgagcgaacgtcgcctgcgcgccagcggcgcgaaatatgacgggcaattacgcggtggcgcgttcgttccagctatcggagtgaatgatgttgccgtctttataggtccaggtgatcttctcgtagcgcagctctatctgttccagatggttgtgcttctcgtaggcggggtttttgatgtcgtgcatcaggggattcactttcaccaccttgacgttctcaagtttggtattgaaatactccacttcctggccggcatcgttgattcggtaccacttgaactcagcggacttcagggtctgaccggtggtcactgccttgtacaggtaggggctggaggagtcgatctccttggtgaacaggaacggcgtatgaatacgcgtgccggtcagtttgccggtgttgttatcggtcgggatgtacaggttatgctcctgagccaccacttcgatactgccttcacgatcctgaacgtcgacagaccctttaatgtccgcgccgccgtcgtctttcagccaaagataaacaggaattgccatggaattactctccattgtgtagtgaagcgccatcatcctgggatgacgcagagggttggtccggtaaccggcaggcgtctacctgcggcaccagactgatttcgacacgacggttcagcgcacggccttccggcgtatcgtttgttgcaattggtcggctttcgccatagccctgaacggcaaagcagctgtccggcacgtcgccggtatcgcgcatccagtcgcggaccgattccgcacgtttcagcgacaatagctggttggctttttcctcacccacgctgtcggtgtgacccgccaccacgatcagccacccgggcctggccttaatgtccatcagcgagttgaccagccgctttgtcgaaccaggcttcagtacccatttcccggtatcgaatagcgacatgctgtcaaggcggatgacatccggggcaacgtgctgcaccggcccgggcggcggtggagccggcacgtaaccacgaatcgcctccagcaacggcaggcgaatctgctccccgtgatacaagcccagactcaggcgcagcgggacgccgttacgcgcccagctatcaagcagcgcggcatcttcacgcagcaccctgacagcgctggcttttggtcgataatcatccatcgcaatccgctcataacgcgcaatatcgacgccaacgcgctgcagcagttgtcgattgttccagccactgctgagcagcgcggcgacagccgcgagggtgaaaatcgcgagcgccgcgcgccaggccctgcctcgtggcgtgagtccccgtcccgccggtaactgcggcaggatgaattccggcaaagctgaagcgtccccggtgtcgctctcatctggctgccagccagctacccgcgacaggccgctatgtcgggataaccacgtcgtccaggccgacgatgccagacttccgggcagcgagggcccgaggccccacagcacggccgcaggggtcagaggtggcaggtcggtattctcttccgtcaacacggcatggacgtgctgttcagaccagtccatcaggctgttcatcagcacctgctgctccagcgcggccgccccgccggcgcgtacccaggccggtacggaacagggggcgcaggagggctgccagactttcaccgcttcacccggtttcgccgcctgccacaacaggtcgcgactcatcgcgctgcccacctgcccctgcagcgccagcggtacggcataccccgtctgctggcgcagctggctgagttgccagcgcagggccagcagagcgctggtcagcgcatcgctttgcgcatgccgctgcgggcagacgcagagcagcaccgacagctgaggcccccattccggccgctggctcaatacctggcgcgcgacctgctgcagctcctccgtctttttcacgcggatccagcagccctgtttgaccactcgcaccggtgacgctggcggccagacacacggcaggtcgccgcaaacgaggaccaccggctggcgataagcgccctccgggagaggggcctgggttgatgcgacgttacgtccggtacgacgactggcgatgcgccagatcccgatgatcagggccagcgtgaccagcagaatgagccacgccccccagcggggaaccggcaaaaatagcaggcacaccagcgcactcagcagactggcccacagcgccagcccacgctgctgcgcggggctcatttcacctcccccggtaacaaggtcagcagcaggtgatcgagccagtggttgagcccccaccacagggcgagtaccactaccacgctcaggccaatacgtaccggccatggggccagccagccgcttatccccagaccggcgcgactctctaccagtacgggagcggtagccgggcactgaaaaggaggaacacgctcaccgagcgcgttgaccagcttcaggcgctcggggtcgtggagggagcgaaagctgccaataaaacccagcagcatcacccgctgaaaacaggtgaccacggccaggttggacgccggttcacgcaacacatcacgcatccgctcgcacagggtgtcgccggcgtccatggtgccgaggaagtgcccctgcagcggaatgtcataccactgcaggcaggcctcatcctccacgccgcgccctttcacggcttcatcgagcagcgcgcactgggcggtgagaatatgctgacagctggcgtcatcaagcccgctcgccttcagctcatgttgcacgcgctcgacatcagcaatacagcgctgccatagcgtgtacccttcctcatcgcggaactgcgggccgtggcgcaggctgataacctgcagccaggtgttctgcagcagcgcatcaatatcaatggacgcggcgttgccgcgtttaggctcattcacgttcgtagtaccgcaaaaagttcaagttcaggctcaccgagcatccccgggacgtaaaacatacaggtgccgctctgcagcatttccgttgccagagggtgggacacatcgaggctgaaatactgattttccagacgcagcgggatcgccgccggcacatgacgcaatggcgtgaggggcacccctgtccgcgaggagttgacgatggctttgacatgatccggactgcccactttgcactggcgcggaaactgctcctgcagttgggcgaccggtaccgacgaacgaaccgacaggtagtaatcagccccttcccgcagccgggcatcgtgcagacgcgcctgccagaagtgcagccggacatcatgctccagggcaatcgccaccacccgcgatggcaggctcgcctccagcaggtcgctcagtaaatcaaacagcggcggaaaaaccgcgttcagctggtcatgctgatagatcgggacggcattcgcctgatgggtgagcgaaaaggtcagcaggctaccagccaggcgcgccagctccgggtagaggcgttccggcgggctttgccggtaacgcagaaagtaccccagcaccggctcggcgctgttcagcgcattcagcaaccagaacagagagacatcggctacggcaaaatcagccatccgttcattgctttcgcgacgcatggccatcaggcgcgtcagacgagcccggagctggacgagcagctgttcaagctgcctcgccagccagcggctgccctggatctgcagcagcggcgggagaaacgtctcgtcgataagccaggccccctgcgagtcccgctgcaggcgaacaagcggacaggtcaggtaatcgctgttgtcctggtgggcgaagcggaggatcagctccggctgtatgacggcaatctgccgggtatcatccccaaactggttacggacatcgcgccagcgctgccggaagcgcaccggcctttcggccacctcctccggcttcagacagttgccgccattcgcctgcatcaggggcagcgccagcacgatcaccgcctcgccggacgcgccgtccagcgacagcgcggacggcagcgcatcggcattgtccgtatcaatcatcgtgccatcctggaaccggacctgcagcctgtgagcctgcaggcggcccagtttgagcatctctggttcgaaggtcgcctcaaccactccccaggggtggttaagacccatccgggcaatcacttccgcagtccaggctgcatacgcagcctgctgttgaaaatgctgaggcgacaccataatgccccggccccacaacggacgttccgttttcatcatcgtccgaacctacgccttcgcctttggcatctggctaaccagcgacagattgacgtccatcccctcgacctggaagtgcggcaccgcgtacagcttcacgcggaagaagcccgggttatcctcgatatcttccaccaccacgctggcatcgcgcagcggatgggaggcctgcagctcgtcgccggggtcggtcatttcggtcaccaggctccgcacccaggtgttcagctccagctccagcagacgccggtccttggtggtgccgatattttcgcgctggatcatcttcaggtagtgcgcgatgcgcgacagcaggaagatgtaaggcagacgcgcgttgatacggctgttggcggtggcgtcggcggtatcgtacagcgccggtttctgcgcggagttggccgagaagaagcaggcgtaatcgcgatttttgtagtacgacagcgggataaagcccaggctggcgaactcaaactcccgcgtttccgggatcatcacctcggaagggatcttcacctggttgccggtgcccagatcgtacagatggataggcaaatctttcaccgcgccgcccgcctgcggaccgcgaatttgcacgcaccagccgttgttaacaaagctcttcaccatattagatgcgaaggagaacgccgcgctggtccagagatatttttcgtgatccgggcccttcacctgctcgacatagttgaagctgcgcaccggcacggtgtccggaccgtacggcagacgacccagcacgcgcggcatcaccaggccgatgtagcgggcatcgtcagtttcgcgaaacgccttccagcggatatattccgcacgatcgaagtagttgccgatatccttaatggcagccacctcttccatggtctctttcaggaagaaggccgggccgacggcgccgataaacggcatatgggcggccgcagagacgcgggagatattgcgcagcagcgccacatcctgcgggctggcgtcgaactcataggccgagatcaccgagccgatcggctcgccgccgggagtgtcatactccgcggtataggtgtgccagtacaggccgctctggataagctccggcgcgtcctcaaagtcctggcgcagatcgtctttggcgacgtcgaggatctccgttttgacgttctgccgatagtcggtgttgtccaccagctgtttgaggccgcgccacagggattcgacctgctgaaactcctgatggtgcatcaccgcgtccagctgacggcttatctggaaatccagctcggcgatatggtggtcgatcagcgttttgtcgagcttttccacccgctggccggactgacggatgcgttccataaacacctgcatcgccgcggtgagacgctccgccgccggcgcctcggagagcgcggcatcgtccagaaagtcgttgatatccccgaggcaagacgccggggtgagattaattttttcaaacagcgaggcgtaaacgccctcgcccgcgctgttttcctgcagcgtggtttgcccctgaacaggggcgttttctgtggtaacagacattagcattttcccggttaatccattaacagacttgccccgcacttatttcggggcaagcgcactcatttcgtcgcgtaattcctgggacagcgccggatctttcaggattgcctcaagctcttttctgaaagtggcgttatcgagcagattggatttgagatcgcgtaataaattacgcatcgccagcatggcgcggagctgcggaatttgccgggcaacctgctccggttcaaaatctttgatgtcggtaaaacgcagtctgacgttctcctcttcgccattgccggccagcgtattcggcaccgagaggttaacttccgggctaaattccgaaagtacgctgttaaaattatttttattgacgttgattttttctctttccgataaaggccggttttccttcccatgactaaaatcgccaatggtaagcagcttcagcggcagttcgaccttcttttgcgcgccgccggtatgaagagataatttgagattaatgcgcgccctggggacttcattctggaacgtatcagccatagcagttcctttccttaaggaataattattgaagatatattgatgtgaaacgtgacgatgataaagcaaaaatggattaccgatcaacttaaccacctaataattatatttattcataaacacccactttcaccacgaaaataaaagcaccatgaatatcaatatttaaaatgtgaaacaacagtcaatgataaattcaataaataatgcaccaaaggaatgtttgcaatggatactataaggcgggctaaaacattaagcggatgaataaaggaaaccatagagacgaccggggcaatataattcgctcattatgcaaatttagcgtaacaacgcaatcaattactcagagggaaaatatctggcttccatccgattgccccttcgcggcgaacgcttaatagtgctggcgcgaaatctaaacggtaacaatattcttctgctccccttactccccacaaaccgattttttgcggataacgagccacagcgcgatatcgaacaaagttgtcgttagcaaaaaaacatgagcccggttacaagacgcacacgacaccgtcgtcggcatcctgaacggttcgcattctgcaagtcgccaggctatatctaagacacctttcgcccacaacgagacacaaagatgagcaagaaaatcctaatgctggtcggcgattatgccgaagattacgaaacgatggttccttttcaggcactgcagatgattggccaccaggtcgatgccgtctgcccggataaagccgctggcgactatgtcatgaccgcaatccatgactttgacggcgcccagacttatagcgaaaagccgggccatcgcttcacgctgaacgctgacttcgccgcagtaaaggccgagaactacgatgcgctagtgatccccggcggccgggcgccggagtatctgcgcctgaacgaggaggttattaaactggtacaggcattcgacgccgcgcgtaaacctatcgccgccgtctgccatggcccacagctgctggccgccgccggtattctgcagggacggacctgcagcgcctatcccgcctgcgctccggaagtgcgcctgagcggtgggcactatgcggatattggtatcgaccaggcgcatgtggacggtaacctggttaccgcccccgcctggcctgctcatccacagtggctggcgaaattcgccgccctgctggcggaataaccatactgagccggcgtttttattgagccacccgctcccctgcgggaatctatgcctcagcgcggtgtttagtctcgggtaaacgcgctgttgtatgttataccgatggcggggatgcgccacgatttaccgcttatcttcaggggccggttaaaaaaccagcccctgaaagatttatcgctgccctgacgggcatcatcaattcagcaacgcgatctgcttgaccactatgtcattgattttataggttatttcaggagttacgcgttctttgatatcgcggtcaacaaatacccgaatgcaatatttgatgatttgatactgatttaacttatcaccacattcaattaacggttttatttcgtagcggttcttaagatctttcaccaaaagcttaacttcggttttatccaggtctttaaaggcgcagtcggagacaatatcaacggcaaattcatgtggtttgaaatgaggctgtaatacagaagtcaataacccggtgagttgactcttccacgccttattttccttgtcaacgatgttagctttatacacagagtgtttggcctcatagaccttcgaccatgggtgtcggttaataatgtcatcaagtatttttttattaaccgcctcggtatcgctgatatctatccattcaccaaccttgtcattcaaaaaataatcatcactgcacgccagataaaaatccttcagcgcgtcgatgaagctttcatcgctatggtcaacgatacggtcggtaacgtcagcgataatgacattttgtggatccttgctttgcataatctcacataatgtgctcaacatcgtcgcaaaggcgcggtttgttttatggtaatatacctgcgaaaaaaggctggagcgcgccccaataaactcagcgatcgaatcaatcccactctctttgtaagcaaggtacaattttccctgttcctcgaccgggacaattgacataaacaagcgattgtaatcgtagatgccacacttgacgccggagaaatagccatctctgagcaagtaatccatccggtcggcatcgatcggacaggaagagatgatcgaggtcattaacggcaggatatctgttgcctttccattaatttcctcaatgatctgttggtcaccgtatcttttttcgataatttttaacacattttcgatatttatttcgtcatcgaccttaccttgttttctcagatcatgataaatcatcaggctgaacaacagcgaaagctgttcatgttcaactttctgttctggcttgcttaatacatcaatgatcgaatggtaggctgtggggagaacatcggagaattcgtgcttaccaggcataaaactctcaaactggtgggatacaggcccatgcccgatgtcatgcatcagggcagcgagtctcaactcctgaatgttgtgttttggtatctgatcgatatgaccaaacacatggccatcatcatatttcttttgataccgtatcgcattcaggcgtaaattattgagtatttcacttgataaatgcagtacgccaagagagtgttcgaagcggctgtgcaccgcagagggaaacaccttatataaaaaagagttctgtttaatgttgcgtaagcgctggaacagggggtgattgataaaggcaatctcgagtgtcgtcaaacgaatagtgccgtgaatgggatcaaggatcttactggtcaattcattttcaaaatccatatcttaaatcctttcatacgtgcattaaatatatttagcatattgactgtttattcaacaataatcttgcgcattcaggcaataaggtcaatcactaatatttaacgagcaacgcggcagatcattatttccttatctctccacagcgtcgcgctatatcggcatccactgacatatcgattgactacggatgaaaacagccccggttttcttcgctcagatgcgcattcccccggaaacctcaatgcgctgggcattcacccagcgatgatcatcggataacagcgaggcgatcatcggcccgatatcctctggcaggccaggtcggcccagcgccgtcatattcgccaccgcctgagcgacctgcgggttatcccgcaccaccccgccgctgaaatcggtggcgatggcgccgggcgccacgcagttcaccgtgatcccgcgactgcccagctcaaacgccatatagcgagtcagggtttccaccgcggatttcatgatcgcatagggcgcccggttcgccatcacgatgcgggtgaggccggacgaaacattcactattcgcccgccatcggccagcagcggcaatagtttttggctgaggaaaaaaacgctcttcacgtggatgcgatacagcgcatcgaattccgcttccgtggcgttaagaaatcccatgccgctggcgttgccggcattattgaccagataatcaaatttatcggcgcccagctccgtcagcgcgccctgaaaagcgctaacaaatgcgtcaaaggtgtcgatttcgccggcgctgaaaggcaacgcgatcgcccgggcgcccagtgcttcaacccgtgtaaccacctcgttcgcctcggcaagacgcgttttgtaggtcagtactacatttacgccgcgctgtgccagcgcttcgacggtcgcgcgtcccaggccgcggctgccacctgtcacctgtcaccagggcgatttttgcgctattgttcatgttttctccttttctctctgctgaaaacatgagcgattataagcccctgaatgccgacgataagaccgcgttgggcgacaggatagttttgccagctggaacaatgtcatggataaactggatactctgaccttgtttgtgcgcatcgtcgaacggggctcattcagtgccgccgccgcggatctgggggtttcccggccagtagcgaccgcggctattaaagcgttggaggtcagtctcggggcgcggctgctacatcgtaccacccggcacgtacggccgacggcagaaggctcgctgtattatcagcgctgcgtgtccattctggcggcccttgaggaggccaaccgcagcgccggggggagcatctccggcaccattcgggtagacgtggcgggcaacctggcacggaccctgcttctgcccgcgctgccgcagtttctcgcccgctacccggacattacgctgcagatcggcgaaagcgagcgtgacgtcgatctggttcgcgagggagtcgactgcgtcattcgcggcggccatctccccgacagcgagatgatctgccggccgctcgccgggttgcaggagatcacctgcgccagcccgacctatctcgcccggtacggcaccccgcatacgattgaaggactgacgggccacgtgatgatcgggtttgtttcatcgcgcacgcaacgtaccttgccgctgagctttacccaggatggccgtcagagcgaggtcagtttgccctgtcggctgctgacttccgatgccgacgtcggcgccgaagcggcaaggcttggctttggcctgtatcaggcgcccttgccccgccttgaggccgatctggcgtcgggcgcgttaacggaagtgctggccgattttcgtcctgcgccgctgccgctctccctgctctatcccagtaatcggcagctctctgcccgggtacaggtatttatcgactgggtgacggcgctgatgaagcctcccctggcgcagcaggcatccggaaggctaaaataacgtttgctattattcacggcacgtgcgttaatcgttgagtcgatttaccagacaaaaagttattatctgagtacgtgttctcatctccaggcgttatccctgataccaccttcctttgagcagtcccgttagagtttgctttttctgtaaacaggccctgtcagatccttgtcggctccttaaaatgtccgccatctgacccaaaacccggcttaccaccaactaaaatcagccgcgttaattttcctgaaacgaccattgtcttttcaacagaacatcacccatacaaggtttacattatgatcgaacatatccattttagatgcccatgctgccatggctcccagtacagaacgtcccagtttgacgtcactgaaaaaaacccttttggtgcgaaatgcattttctgcaaatcagccatgatgacattagataccatccgtcctcatcacctgggcgtgcactccgctgcccaggcacagcaataagatgatgaagccggtgaacgcgggtggggaaatttccccggtgattcgcccgggggcaacatctgttccctcacccgcagcgatcgtcggtggcatggcttaggcgggtatcaggcaacgcttctatcagggtagtcacgttctccccggcgccagtttctacattaaaatagtccaccgcacgcagaataagccgcaagcccctgccgccttccgctaacggatcgacatcaaagtgctcatcgttacgcgccagcgccaggcgttcggcaggaaagatctctcccgcatcgataaagcgcagcgtcacgcggtcattggcagcgaaaatttcccgggagactgccgctttaaaggccactgcgacggaagcatccaaccgacatgtcaccggccagaggatcaactgtcaccagtcagctgcccgtgacgatcgactaccgcattgacaaccatcgcggcaaacgcgtgggcgctaaccagcatactgaacccgtcgccgcagcgcaggcgaggagatggatatcgaatcagccgatgccgcaatcagtcgtggattttcacccccagacatccgcgaacgaactcagggttgaagtgttttaccgcttcgccaacatagcctaaatccagggcgctgatttgcgccatttcgttatctgttaatacgaaatcccagatagcaaaattttcttcaatgcgctcctggcgggtggatttagggatcaccgtgacgccacgctgcacgttccagcgcagaacaacctgcgcaatggttttctggtgcgcatcggcgatcccccgaagcaatgcatcttgatacggattatgtctgccaccgcctaacggcgcccacgcttcaggctgaacgtgataatgcttcatggcttccagcgccgcgggctgcgcgaaataaggatgcagttcaacctggttcaccatcggcctgattctgacagtttcgcagaagttagctaacacatgggggtaaaaattggagacgccgatcgctttcagggtaccggcctcataggcctcttccagcgcacgccaggcgctgaaataatcgcccatcgcctgatgtagcaaataaagatcaaagtattccaggcccgatttttttaatgacgcggcaatcccggctttcgccatcccggtgttggccatgtcctggacccacagtttggaggtaataaacagcgcctcgcgggtacacagaccttcggcgatggcttcgcgcacggcctcacccaccgcatcttcattatcgtagacggcagcggtatcgatgaggcgataaccggtgcgaatggcgttcaacaccgcctgcttacactccgctttatcggtcaccttgaaaacgccgaaacccagcatcggcattttgcgagcgttacttaatactgaatattccacggtgaagctcccctcttgttaaaacaccatggtaagacaggaacgcggtcacgattagcctgtcattcctgatttgacttatgcattcaattcattaatcgcagtgcgctgagatgatctgattttgacagagagcagaaaagtcacccctgccgcgcccagcagtaacagaccgctcagtgcaaaagtgctgtgccatcccagactatcaaacaccaggccgcctaccgttgacccgagggctatcgatagctggatcacggcgaccatcagcccgccgcccgtctccgcatcctcgggcagcgtccgcgcaatccatgtccaccagccggtgggcgccgccgtcgccagcagcccccacaggcttaacagtacggcgaccgatcccgtgtggtgtccggccagcagaagcgttccggcaattgcggccattaacaacgggatagccaccagcgtcggataaaatcgggcattcagaacggtcgtaataagcagcgtgccgataaaaccggcgatacccattgtcagcaatatcagggacagaccagaaggactgacctgggtcaccgtctccagaaacggtcgcacataggtaaataaggtaaactgtcccataaagaacagtccgcaggccagcaatcccagggatagcgtagaaagacggaacagacgcagcaccgatccctgccgctgtggtgcgcgcggacttttcatcgacggcaggctaatgcattgccagacgaaggccagcaccgccagcgggacaagacataaaaaggcgccgcgccagctgacggtggcccccaggtagctgcccagcggcgctgccacaacggtggccagcgcgttgccgccgttaaagatggccagtgcgcgggggacctggcgttgcggcaccagccgaatggccgttgccgccgacatcgaccagaagccgccgatgacgatcccaatgagcgctctgcccagcatataaaccgggaaactggacgccagggcaataatcaccccagaggctgccatcaacgccgtgagccccagcagcagccatttacggtccagcgatccggtaagacgggatatcgtcaggctggtcagtaccgccagcgcgccagaaagcgcaatgccctgaccggctaatccctcggtaatgtgtaaatcacccgcgatgggtgtcaacagactgaccggcataaattctgaggcaatgagcacaaatacgcagagcgtcatcgccaggacgccgctccagtgtgcccgggtgtgacctaatgcagacattatttctctccgacaagacaaagccgcccgcaggcgcgtggcggctttggggatgtctccggcacaggagatctatttcaggttggttttaaaaaattgcgcgaacgtcgcaaagggaattttgcccgcgacgttgtcatagagatcgacgtggtttgcgcctgggacaatcaccagcgctttctctttactgccgatggccttaaaggcatcttcggcaaaatagcgtgaatgggctttttcgccggtcacgataagcgtcggaatagtcacttcgctggcgtaactcagcagcggcatattcataaacgacagcggcatcgtcgcattccaggccccggttgaattaaccgaacgcggatggaaaccacgcggtatacggtaataatcgaagaactctttcaggaccgggttggggttggcgggcaaggtttccggcaaaatacgatcggcagcgctgatgttgcctttatcatcaacatatatgtcatgcccaccgggggcggaagtgccgtttgccgcatccttccagcgctgcgcgttcaagtactgcagtaccgctcggcggtcggctgtcgtgtagcggtctttgccatcgcccactccatgccccatcgcgcggctcatgtcatacattacgctggtcgccaccgctttgacgcgtgtatccatcgccgcgtcgttcagggccataccgccccagccacaaatgccgagcaaaccgatacggttgcgatccacctctttttgcaggcccagaaagtccaccgcggcactaaaatcctcggtattgatatccggtgaggccacgttgcgtgggtagccaccgctttcgcccgtatacgatgggtcaaatgccagggtgacaaaaccttgttcggccagcgtctgggcatacaggccgctggactgctcttttaccgcgccgaagggaccgctcacggcaatagctgccagtttgcgttcaccgcgatccttcggcaggtagagatcgccaactaaggttatcccgtagcggttctggaaggtcaccttacggtgatccactttcgaactctcagcaaaagttttgtcccatttttcaatcagtgaaacaggcgcattcgggttagttgtctcagcagagctcatcgttgtgacgccagttaatgaggcgcaaagcagcatggcgggtatcgcggctgtcagttttttggtgaaaaccgtcatcaaaattcccctaaataaacgtgatcaatgcaagtctccagtagacaatgcagctttgctttattgtcgtgcgcttagtgtagccagcagtaatggttctgattagaggctgaaaaatgctaagattaataccatattgttctaaatggcatctgggtgacgaggcaggataatggcgaaacgggaaaactataatgacctttatctgtttatgcaggtggtacgggaaggcagttttaccgccgcagcgcaacgacttggcctggcgcagtccggggtaagccgtgcggttcgtgaacttgaagaacgcctgggcgttcagcttctggtgcgtaccacccgccggttgtcgctcactcaggcaggtgagcagctctatcacaacgtcgaatccggtttcgacgccttagatatggggctcgccacgctggcccactatcgtcagacgccctccggtacggtacgcatcaatgccagccagcatgccattgataaagtcctgctgccgaagctggcagtatttaaacaacgctatcccgatatcagactggaactgatcagcgaaagccggtttgtcgatattattgcgcagcgattcgatgcgggcgtgcgtctgggcccggaagtcgggagtggcatgattgcggtacgcatttcgcccgatatggagatggcggtggtgggtaccccggaacattttcgccgctacggctttccacaaacgcccgccgatttagtcgcccacccctgcatcgcttatcagttcggcgacggcagcctttacgcctgggaacttaatgtggatggcaaaaaaatcacccacccacctcagggacagtgggctttcgccgatagctatatggaggccaaagcggcgaggctcggtctggggctggcctatgtcccggaagagctgattaccgacgatctagcccagggcacacttatccgggtgctccagcgttatagccagcgtctggaaggttcatttctctattacccgcaccgcaatgtgtcgcccgcgctgagagcggtcattgatacattgcgaatgtagctgaggttgcctgcaggcagcaggcaaccggtagtggccggtgacagcttctgtactcggacctgtcatttaattccgatcgatgcaaacagtaatgccagacggaaatgaatttatataaatattaattttgtgagttatgtacttcattataaagtttagaagcagcacctctgcgtaacaagctaaaaaagcaaataatcgtaaagatgaaggggtaaatagccaaaacccatgccagtttttgatttttaataatattatttatagtatcactcaacgaaccacttgaaaagttctcacaaatcctgtcaaccgagcgcacacttatccccgctttttctgagaaaaccgttttatcgaaatcttcactttcacactgttttttatcgagcttccactcagtccagttcaggggaaggtaattattggtccagatcgaactctcagcaatatgatcattaatccaaacccatgacttgtcgtcgcctaatcgtactagtgcggatggcttcaatgccagcaacataaaatttgataatagcagcatagttaacacacaagagacaaatacaccaacattagcgataaataatggttttattgccttaagcgttgatatttcaaaccatcctttcgcggctgtgacatgacgaatatctatatttttctttttcgtccagttaatcagtgacttgatctcttctttatttcttgcgccgacattaaataaaacattaaaacgttcaacatcatttctctcattgaaatatgcatttattttaccgtcgtgaaacgttttccctcccaggcagaactcccatagccggttcaataaagaatatgcggatcctgcccgtttccagataaatactcctaataaaccaaaagtaacaaaaattaacgcgctatttatcagtccatcaaaattccatatcgaagaaattaaactttccatctagcccctcttaatcatcccgctaatcgtatgctcagcaatcacaccacagcatcattacaaaataaatattttttaactgcaacttttcttatccagcgcacaaggtcattgccgatatcttcttatacgcaggccacaactatacgtcacgctcttctgctacttgagccttacattccacctcagtgctgctacgctatctctgagaaaatggcgaaggagatataatgaaagtcctcaatatcctgatccgtcgatgcgtgctgattgcccgctttgaagataccgtttcgttctacgaaaatctcatcgcgcagaaggcaaggttgcgtttcgactatcccgaatacgatctcaaactggcgcaggtgggttccgtgcttttaattggcggaaccgagcaaagcctggctccgtttcgcgccaccgaggccactttcctggtcaacgacattaccgcctgggagaaacatctgccttccaccggggcaacgattatcaacccggtgaaggccgtgcccaccggctggaacatgctggttcggcatccggatggcatggttgccgaatacgttgagcatcatgataaaaacccggcggatgagatcttctgatgcttcgcgaccagatggtagaacctggcatcagtcggccatactgccagaaaagtgagactttctactgtggcgcgagaaggagagcaggaaaaactggcgcggcaagacgcgccagctcggggatcagcgatggttgcctggcatcatcaggcaaccagtaccggttagtgcttcacgatatacatggtacggctgtaggccacatcttccgggttggtgatcgggtagcctttcagccacggcttaatcaatcggccgttagtgtactggtagatcggcgcgatcggcgctttgaccataatgatcttttccgccgcgttgtaatcgtcgttacgcgctttggccgaattctctaccgccgcctgggcgaggattttgtcgtacgccggatcgttaaagcgcgagatatttccgctgtgggtggaggtcagcagcgacaggaaggtggacggctcgttgtagtcccctacccacgaagcgcggatcacgtcgaaattgccggtgttacggctgtcgatataggttttccactcctggttctgcagcttcacttccacgccgaggtttttcttccacatcgacgccaccgcgatggcaattttctggtggttctcagaggtgttatacagcagcgtcagcttcagcggacgattcgggccatagccagcggcagccagcagggctttcgcctgggcattaagctcagcctgactcatgctctcaaactgtgacggctggggggtgaagcccgccgtcacgtccggcgtgaagcgccaggccggtttttccccggtccccaatactttctccgccatcacccggcgatcgatggtcatgctcagcgccaggcgtacccgctcatccgccgtcggccccttttgggtattgaaagcgtaatagtaggtacccagctgcggcggggtatacacctgccccggaatatccttcagcagtttctggtacatatttttcgggaaagactcggtgatatcgatatcccctgcaagatagcgcttggtggcggcggactcctggttaatcggcacaaaggtgacctgctggatcaccgttttggcgttatcccagtagtgcgtgttcggcaccaccaccagcttctcattgaccacacggtctttcagaacataggcgccgttgcccaccaggctgccgggccgcgtccagttcgccccgctgtcgacattcgccttttgcaccggatagaaggcaaagctggcggtcaggttgctgaaccacggcagtggtttatccagctgcacccgcagggtgtgggcgtcgacggcggtgactcccagggtttccggcgcggctttgccgtcaataatgttctgcgcgttagcgatccccgccagcgccgcgaaccaggcgaacggcgaagtggttttcggatccaccagacgctgccagctatagacgaaatcttcggcggtaaccggcgtgccgtcggaccagcgggcgttatcacgcagggtaaaggtccagacgcggttatcgttgctctgccagcgggtcgctacgcctggaaccaggttgcctttcgcatcctgattgactaaaccttcaaacagatcgcggatcacctggatttccggcaggcccaccgctttggcgggatctaacgaggcgggttcatctttgatatggcgcactaacagctgtttttccgccagtaccgtgcccggcggtacgtcagccgcccaggccagagaagatacgctggctaaccacagcgcgccgcatgtcaaagcgacaggatacttcataagatcccctttaaaatgaaaaaaataccgccaacagagcgataattatttgtttcatcacctgaaattgcaaacgacatatgatagaaaattgatgtgccgtcggatttcacgcctcagggaatgggtttgatcccgatacgcttttcgccaacactaaataataacgacacacaggaagccctatgtctatttcacgtcctcgcccgcagcgcggcgactttccgccgggaacccggcagtatggcagctcggaactgggcgcgccgctgctgtggtttcctgcgccgcaggcagacagccgtagcgggctgattattgccggtacccacggtgatgagaattcgtcgattgtgaccctctcctgcgccctgcgcaccctgaaacccgagctgcgccgccaccacgtggtgctgacggtcaatcctgacggctgtcagctcgggctgcgcgccaatgcccgcggcgttgacctcaaccgtaactttccagcagccaactggaagcaaggggaaacggtttaccgctggaatagcgcggcggcggagcgcgacgtggtgctgttgaccggcgagcagccgggttcggaacgggagaccgaggccctgtgtcagttgatccatcagattcatccggcgtgggtggtctcctttcacgatccgctggcctgcatcgaagatccgggccacagcccgctgggtcgctggctggccgacgccttctccctgccgctggtgggcagcgtgggctacgacacgccgggctcctttggcagctggtgcgccgatatcggactcccctgcatcaccgccgagtttccgccggtctccgcagacgaggcaacggagcgttacctgccggcgatgaccgatctgctgcgctggcaggcttaaagatgaagcacgccggtgctgaaccgcagcgccggctcaacgtccaccgccagccatgtcgggccgtcgaggtcagcgaagcgcgccagcggcgccagagggagcgcggcggcgatcccgcgcgaggtgcaaagcatacagcccagcatccgttcaaatccctgccgttccgcctccccggccagagccagcgcttcggtcaggccgcccgttttatccagtttgatattgatcatctcatagcgcccgcgcagccgcggcaggctctcccgggtgtggcagctctcgtcggcgcaaatcggcagcggatgaacgaagttttccagcgccgagtcgtcgtcggcggggagcggctgctcaagcatcgccacaccgaggtccgccagcagctgacagcgcgccgccagcccctcgctgtgccaggactcattggcgtcaacaatcagcgtagcctccggcgccgcctggcggatagcgattagccgctcgctgatcagtcgatcgtcgagcttcaccttcaacagctgggcccctgcctgccacagcgccgcggcgctggccgccatctgatccggcgtgccaatgaccaccgtctgggcggtaatcacccggttaggcaacgccacgcccaacagctgggccaaggttttgccttcgcgccgggcctgcagatcccatagcgcgcagtcaatggcattgcgggcggcgcctgccggcagcagccgctgcagctgttcgcgggtaagccccgcctccagttgctcgccgatcgccatcacctgggccatgaccgaggcgatgctctcgccatagcggggatagggtgtgcattcgcctacccctttcacgccgtcctcttccagttccactaccaccacttttgcctcgctgcggctaccgcgggcgatcacaaaaggggtatggagcggccaggcttcctcatacactcgcacgttacgcattcccttgtcctctctggtaaatgttaaatagggtttgccgtgtagctggcggatgtcatacactactcgcgacgttaactatatgtaaacaggaagataaccatgtcacaaaccgtgcatttccagggcaaccccgtttctgttcagggcaccattccgcaggcaggcgctaaagcgcagccgtttacgctggtcgccaaagatctctctgacgtcgcgctgagccagtacgccggcaaacgtaaagtactgaatattttcccgagcattgataccggcgtgtgtgccgcatcagtgcgtaaattcaaccagctggccgctgaactggacaacaccgtagtgctgtgcatttccgctgacctgccgttcgcccagtcccgcttctgcggcgcggaaggcctgagcaatgtggtcaccctgtccacgctgcgcggcgcgtccttcctcgctgactacggcgtcgccatcgccaccggtccgctggctggcctggctgcgcgtgcggtggtcgtaatcgatgaaaacgatcaggtcgtctacagccagctggtgaacgaaatcaccgaagagccggactacgacgccgcgctggccgccctgaaagcctgataacagattgcccgggcgcatcgcgctcgcggacattcgatctgcccagccctcgctctgcgagggctttttattgccgcggcgcatagcgggagatagcccgcgccatcgccgggccggtcagcaaaatggtaaacagccgcagcgtctgtagcgccataataaacgacatatccgcccgggtgccggcggcgataatcgccaccgtgtccagcccgccggggctggtggccagataggcggtcataaagtccatctgcagaatgtgggtcagggcaagggccatcagggcgcacatcaggatcagtccgaggatggaggcgataatctgcggcagcgtcttgagcgccagcagaaaaatggctttattaaactggagccccaccgtccagcccagcaccgcataggccatcgccagcagccactccggcagctccagcatcagccagccgccgccctgggccagcgcgccaagcagcatcggcagcagcatggccccggaggggatgcgcagccgcatgcccagccaacaggccaccgccgtcagcagcagcgtgaaagggaaattcagggtcaacgatggaaaccagacaatatcctgagtcatttcctgtgcttcattgcccagggcatagcgcaccaccagcgccgccgcgccgacgacaaacagcacccgcagatactgcatgagcgccaccagccgcacatcggccccgtactcctgggccatcaccaccattgccgacgcgccgccgggagagcttccccaggcgccagtggcgcccggcagcgcgctgtagcggaccagcagccagccggtaaggccgcttatcgccagggtggtcaacaggatcgccagcaccagcgcccagttgttgaacagcacgccaaaaacagagggattaatcgcccgggcgatcatgcagccgacaatggcctgcgccgccagataacaggggcgagggatgctcagcttcaccccgcgcaggctcaaaatgagaccggcgatcagcggccccagcagcagcgctgccggcaggtgtattcgtaacagcagcgaggaaaagagaacagagagcagcagcaatatcagccagtgcccgatcgcgcgacgcgacgccaagatgcaccaccccggaaaaaggattaaaaaaccagtatatacaggtttggcccgctttgcaggccgggatgccggcgacgtgagtcgccggcctggcgggattattcgtcgccctttttctgactcagaccatattcacgcagcttattggcgatggcggtatgcgacacccccagccgcttcgccagcttacgtgtgctggggtagctgcgatagagctgggtcagcaccgagcgctcaaagcggcgggtgatgtcgtccagcgacccttccatggcctcctcgcccaccggcagcgaggcgacgtcatggtccggcagcagaatgtcctgtggacgcagctcaaatccttccagctgggtcagtgcgcgatagacggcattcttcagctggcggacgttgccgggccagctgtagcgggtaagcaccgtactgagatcggcagagagcttcggccgcgggatcccctgctcgtcggcaaagcgggccacgaacagctccgtcagcggcatgatgtcctgcgggcaatcgcgcagcggcggcagatacagcgtcaggacgttgaggcgatagtagagatcttcgcggaaaagccctttctgcaccagctcgatcaggtttttctgcgtcgcgcagatcacccgcacatcgacgtgcacttcatgatcctcgccaacgcggcggaaggtgccgtcgttgagaaagcgcagcagcttggtctgcatgcgcggcgacatctcgccaatttcatccagcagcaccgagccgccgttggcttgctcgaagaagcccttcttgccctgcagcgcgtcgccaaacagctcgctctcgaccgcgtcctcgggaatggagccacagttgagcgccagatagggtttgcccgcccgcggactggccagatggcaggcatgggccagcagatctttaccggtgccggtgtcgccgacaatcagcagcggcgcgctgagcatcgccagcttgcgcgcttgctccaccacgtggcgcattttcggccccaccgcgaggatctgactgaaagcgctggtatcctggctggtcatggtctgcagctggcgtcccatgcgcacggttgagcgcaacatcgccacggcgccggtcagcactcgctcgttatgctcgccttccagatagaccggagtcacttccagcaggtagttctgcccattcaccaccacatgctccgcatgcgtctcctgcgggctgctctccagccagcgctgaacgttaaaatcggcgatcagctgggccaccgggtggttacgcagcttcgcctggctttggccaaacagcaggcagctggcggggttcgccagttccacccgacctttggtatccagcgacagcaccggctccggcatcgctaccagcagcgcgctgagcgccaggtgttcacgttcagacggcatccagggcacggtgcgcacgtccgtcacgccggcgatacggcggatctcagccatcaggctgctgaacgtggcgaattccagttcggcgaaattgaggtaaattcggccaatagggtcaatatcgataccgcgcaggtcaataccacgcagcaccagcaaatcgagcaattcacgagtcagaccgagacggtcttcacaaaagacttcaagacgcatgggagtgttcaccctaaaagtgccaatgacgggagaataataggccaggaatgggttttcgggaagctaactgtcaacaattattgacagtgtggcggaaaaatgggcgctgtggcgtaaagtcagacggtcagtggttaaatcaccggccaggcggccggtgagtcttgggtcaggcgtggaaagcaggcagccactgacggttctcagcgatcacctcatccaacgccagttcgagcttctcgccgctgacgatcagcggattcagcatcagagcacgccatgcggtatggcggttgccggtgagcgcggcctcgatagtcagccgttcaaatgatttcatcagctgcagcaaacgcagggtatcttccgggaacggcgccacattgagaggtagcggaccagaagcggtaatcagcgagctgacctctaccgcgcagtcatccggcaggccattgatggcgccgttattacgcgtgttgacgtgcatgataatccgcttgtcgttgtagatggcattcatcagctcgcaggccgcctcggaatagtactggccgccgcgcccttccagcgccttcggtttgaccgccaggtgcgggtcgcggtactggtcaaacaagattttttccagctgcttaaccatttccccgcgggttccttcgccgcccgcctccgccagctcctggcgcagcagatcgtctttcatgtagtaataacgcagataggcgcaggggatcatgcctaagccctgcagcagatgcgacggccaacggaacggcggaatgttgcgcggcaccagcggatcccgaccggcgttgatctcggctatcacctccggcagccattctttacctttgtgcaggatctggcgcacgaagataaagtggttcaggccggcgacctgcatcaccacctctttttcgtcagcgcattgcagcagagtggttatccctttttgcataatcaccggcacgttacacaggccgacggctttgatgcggctgtggcgcaggatcgcttcggtcaccatccccgacgggttggtaaagttcagcagccaggcctcgggacacagtcgctccatatcggcagcgatctccagggcgatgggaatggtgcgacaggcgttggcgaagccgccaaggccattggtctcctggccgatcaagccatacttgagggagatacgttcatcgctgatccgagcgtcaaggcagccggcgcgaaactgcgagcagacgaaatcggcatcgcgcagcgcgctttcccggtcaagggtggccaccacttcaatagtcagcccggctttggcgatcattcgccgcgccagtccggcgataatctcgactttctctttgccctcttcaatgtccaccagccatagcgaagcgaccggcatttcgtgatagcggttgagcaaaccttcaatcagttccggggtgtagctggagccaccgccaatcaccacaattttgagtcctgacatggtatacctcggtttagttacgatataactatttaaaaccggcaaaactggcctaacaaacgaattaaatcggcctatgcatgaactcaattaatgcataagggagacaatctgtgcttgagcaacaaagcatccttgcgctgctgcagacctttgaggtgaccgcccgccacctgagctttacccttgccgcgcatgaaatgaaccttacccagggagcggtcagccatcggatccgcaggctggagatgcacatcgggtttcgcctgtttatccgcatgacgcgtaaactggcgctgacagaggaaggtaagcggctgctggcgacgttaagccattcgctgcgggcgattaacgatgaaattgaggatattcgcgatcaggatctgcgcggcacgctgcatattggtattgcgccgacgctggcccatctgtggctaatgccgcgtctgccgcgctttcagacgcaatggccgggactgaatctgcagtttcgcgtgcgcgccggggtgatggattttaacgaggagcgggtggatctggcaatttactacggcgccacgcgctatcccgatctttatcaacagcggctgatggcggaaagtttgctcccggtctgctccccgcgttatcgccagcagtatcgtccgctgagcggcggcgacccggcggcgctcgtctggatccatgcgtgcgaatccaccgacgtacaggatcaatttgcggaatggcgcctgtggtgccagcacaacggacaggcgttaccttttgaaggccggtattacgcggtgaataaccactcgctggccattgagatggcgctcaatggactcggcgtggtgatggggcgtaaaacgctgatccagccgctgctcgacgccggcaggctggtggccttgtctgaaaatgaagcgccctcgccctttggctatgacctgatctgtccgcaggagaaccgttcccgcccgcgctttcgcgccttcagcgagtggctggcggcggaatgcgcctaatcgaatattgccagggtgcgcgtgccagagcttgacgtcgtaggccgggcaaggcgaagccgccgcccggcgatgtctctgagcggaggttacttctccgggcgggttttgcttttctgcagggtctctttcaactgcccaatcagctcgcgacgaaaatcgccgagtcgcggtttatcatcggcgatccacggcagcgggcggcacagctccatcgccttgatcccgagacgggctgtcagcagaccggcgccaatgccctgcgcggcgcgcgccgacagccgggccgccagatcctgcgacatccagtccatgcccacctcgcgcaccagttcgctggcgccagcgaaagcgatattgagcaacaccaggcgaaacagtcgcagacggctgtaatacccgagctcaatgccgtacaacgtggcaattcggttgatcagccgcaggttccgccaggcgataaacgccatatccaccagcgccagcgggctgacggcaatcatcagcgtcgactccgccgccgaacggctgatttcccgccgcgcctgggcatcgagcaccggctgcaccagctgcgcataaaggctcaccacttcgcgatcgctttgcgtttcgtggatcgcggcataccagcgctgcagcgccggatgcgactgatccagcccggcctgctgcgccagcttctcacaaaacgctttcgctttaccgaccgcgtgactgtgcagcatatcgcgcgcttcatcgcgttcgtgggcgcgctggcgcagtcgccacagacggcgccactcggtggctacagatccgacgccggctccgacgatcagcgccccggcgacgcagccgcccagcgcaatccagtcctgggtctgccaggcgttagccgtccactgcacgccttgcgccacgacgctgacgccgaagatcgccagtccgacgctgaccatccgccgccacaggctgcgtttgggtcgcaggaccgactccaccaccgcttccgccgccccctcttcctcttccccggtcaccagccgcgctggcgcgaagttgtcggcctccagggtgtcgaaggcgcgagcgcctttcagcggcggaattttctccgcttgcagcggcccatcaaaatcaatccgcggttttaacggttcgctcatcgcagtttatctccaatcaaaaattccagcgccgcgtcgagacgaatgtgcggcaaaggccgatcgacatccatgacctgcggacgaaagttttcaaactgaaatccctgctgctgccagaaggcctggcccggcaggcgcgccggcacctcaccgggatagatggtcaacggctggccgtcgctcaggcgattgccgcgcagggcgggaattttctcgccattcacctcaatcagcccgctctgggtcgcctgaatggacgccagccccaggcaatccatactgatcccttcaaaggcggcgttctgccacgcgtcctgaatcagttgctgcaggagcgacaccatattgctgtgctgatcgatcgtgacgtgatcggctttggtggcggcaaacagcagcttgtcgatgacgggcgagaacaaccggcggaacaaggtgcgctgcccgtaatggaaactttgcatcagctgggtcaatgccagacgcatatcgttaaacgcctgcggcccgctgttgagcggctgcagacagtccaccagcacaatctgccggtcgaagcgcaggaagtgctctttgtagaaccccttcaccaccctttcgcaatagtatttgtagcgttcgcgcagcatgccggcgttgctgtgtttatcggcctgcgccagcttggcttcgccgacggcgtcgacgtcgggccacgggaaaaactgcagcgccggcgcgcccgccatttctccgggcaggacaaagcgcccgggttggataaagtgcagcccttcgcgcttacaggcgtggagatagtccgtccaggcggcagcgatatccgccagccgagcctcgtcggcaggggccagcggatccagcccggcgcacagctgccgccagcgggccgaccactccgcacgctgtccctgcaggagcccggtcatctgtcgcgaccagctcagataatcctgcgccagcatcggcaggtcgagcagccactcgcccggatagtcgacgatctccagatacagcgtggaggtatctttaaaatggcgcagcagggagtcattcgaacggtagcgcagcgcgagacggatctcgctcaccccgcgcgtcggggttggccacatggggggctggccgtacagctgggccagcccttcgtcgtaggtgaatcggggaatgccaaagtcccgctgcggcacgcgcttgacgccgagcagccgctcttcgcgtgcggcgctcagcagcggcaggcgggcgccggtgtggatattcaacagctggttgaccagcgcggtgataaacgccgttttaccgctccggctcaggccggtcaccgccagacgtaaatgccggtcaaccccgcggttgaccagcgcattcaattcagttttcagtcgcttcatcgccagtccgttatgccctgaaggtatgtctcgtcatcataagctatctgccggggataagcaggacaacgttaatccttttgcgccttccccacggcggcattatttcatcccgcgcgtgacgcggttggccagccggctgagcagcggctccagcgccaccgccagcagcattttcagcggccgacgcgcgaccgatttaaccgcccagccggcaacgcccgccgggccataacgcagcgcggtcagcagcgccagcttaccgacgattttcagaccgggcttcacctgctgcccggcgcgttgccatttgctattcatgcgttgcctcattcgttaaaaacagggtttacagctggcgaaagcggctgcgcagcgtaaaggtgtcggaggtcacataccgctccatttcacgcagacgctgttcaccggaggccagttcggcatccacggcggccagcagatcgccattgctcggcgctttatgaccgtacagctcgctgtccggtatcggatccagagcaaaagtcaaaatgatgtaggccaccaggacaaagaaaaagaggccgaaaatcatcgccagcacggtaatcaggcgcaccagcttcaccgggacatcaagatgctgagcaatgcccgcgcagacgccctttaccatcccgcgctgcgggatacgccacagttttttattcagatccagcccggccattatttgtccctccagttcggatgttcggcgtccaggatcgcttccagcgcctgaatgcgttcgcgcatccgcttcgcgtcatcggtcaactgcagcagccgttgctgctcattttgcgtcagactgccgttggcgccgcgattgttgtagtgcagccacagccagaccggcagaacaaacagcacaaacagcgtcagcggaatggcgagaaaaagcatgctcatgtgtactccttacagggggtgagccgcggcgcaacgccgcgccgcgcaatcatacttactggttggactgattcattttggctttcaacgccgccagctgctcgctgatttcatcgtccgctttcagttcggcaaactgctgatccagcgtctgctgcttgccaaagcggtggctctccgcttccgcttccatctgatcgatgcgacgctcaaaggattcaaagcgcgccatcgcctcatccagtttaccgctgtccagctggcgacgcacatcgcgggacgaactcgccgcctgatggcgcagcgccagcgcctgctgacgggcgcgggtttcgctgagtttgttctccagctcgccaatctcttttttcatccgcgccagggtttcatccaccagctgcacttcatgatccagctgagcgataaggtcggtcagcttttgtttttcgatcagcgccgcccgggccagatcttctttctctttgcgcagggccagctcggctttttcctgccattccgcctgctgggcgaccgcctgctcaatacgacgtgacagctgtttcttttccgccagcgcgcgggccgacgtcgaacgcacctcaaccagcgtgtcttccatctcctggatcatcagacgcaccagcttttgcgggtcctccgctttctccagcagggagttgatgttggcgttcacgatgtcggcaaaacgagaaaaaatacccataatttcaatcctcatagttctggtttcaggcattcacctgtggcttagctaatacaaatggcgtgccaactttttatcttattgattttaaacaaggtggttgcgaaacgtgctgggcattgctacagtcacctggttaattacactacttaatggcgaaattcatcatggcgcagtacaaggataatctgctgggcgaggccaacagctttctcgaggtgctggaacaggtttcccggctggccccgctggataaaccggtgctggtcatcggcgagcgcggcaccgggaaagagcttatcgctaaccgtctccactacctctccagccgctggcaggggccgtttatctcgttgaactgcgcggcgctgaacgataatctgctcgactcggagctgttcggccacgaagccggggctttcaccggggccagcaagcgccatcccgggcgcttcgagcgcgccgacggcgggacgctgtttctcgatgagctggcgacagccccaatgctggtgcaggagaagctgttaagagtgattgaatatggcgagctggagcgcgtgggcggcagccagccgctgcaggttaacgtccggctggtgtgcgccaccaacgctgacctgccgcagatggtcgaggaaggtcattttcgcgccgacctgctcgaccgcctggccttcgacgtggtacagctccccccgctgcgcgaccggcagagcgacatcatgctgctcgccaaccagtttgccatccagatgtgccgcgaactcggtctgccgctgtttcccggctttagcgaacgagcgaccgcgacgctgctcggctaccgctggccggggaatattcgcgaactgaagaacgtggttgagcgctcggtgtatcgccacggcgacagcgaacatgagctggacgcgattattattaacccttttcgtcagtcccccggctctccgccggaagccgcgcccggcgatgagctgcccgcgctaccgctggatctgcgcgatttccagctccagcaggaaaaacgcctgctgcagcggagtctggagcaggcgaagtatcatcagaagcaggcggcggagctgctgggattaacctatcaccagctccgcgcgctgctgaaaaagcatcagctgtgagaggcgcgcggcagcagcagcgtgctcaccgccatcgcccccagacataagacggcgttaaaccacagggcatactgggcggcatgggccatgcccagcggtaaaaacagcgcgaaaagtgacgctgtcacggcgatacccatcgccccgcccagcgagctgcccatcttatagatccccgaggcgacgccgattttgttctccggggcattggccaccgcggtatccgtcgatggcgtggcgtagcagcccagcccgaggccaaacagcacgttgctggcgaacaccaccccgatatacagcgccttttcgagaaaggtgcaggatatcagcgcgatggcgatagcggtcaacaccggaccggccatcatcggcagccgggcgccatagcgctgcagcagcttctcgccgacccggatcatcgccaggacggtcaccagatagccgagggtcatcatcccgctctccagcggcgtcaggtggtgcccttgctgcagccagatgctggcgatcatcatggtgccaatcgccccattgagcagaaagttcgacagcactgccgcaccgtaggcccgattgcggaacagcgcaaaatcaatcagcgccgcctcgcctttgcgcatgccgttgcggataaatatcgtccccgccgccagcgccccggccagcatggtcaacgacagcgggctgctccagccccagccgtggcccttgctgataaacagattcaccagcaccagcgcaacaatcaggctcagcagaccgccgacgtccagcttatgctggctggcgctggcgctgcggctctccggcgtgccgcgcagcaaaaacagcgccagcagggcaacggcgatcgagaagacgaagatccagcgccagcctagtccggtggcgatagccccgccaacgaaggaacagagaccgctgccgccccacgagccgatgacccagaagctgaccgcccgctgccgcgcacgcccctcataccaggtcttaatcagcgccagcgtcgccggcataatgcaggctgccgacagtccctgcagcacccggcctgcaaggaacagccccggtccctgagcgaccaccagcatggcgttgccgacgatactcagccccagcccgagggtggtcatccgcatccggccaaacttgtccgccaggccgccgctggcgaccacgaagcagccgctgaacagcgcgctgagactgacggccagagttaaggtttcaagagagatatcaaggctgcttttcatcgccggcaccacgttaatcaccgactgggcgaacagccagaaggttaaaacgcttaacacaatccccaccagcaggcgatcgttgccgacaaacggggtgtcgcttattgtgacagtgctcatcgcatggccctcccgtttctcgtgattagcgcagatagcgttccgtcaggccgcaccacagcgccgcgccggtcagcaacagcgcgtcgttgaagtcataccccgggttatgcaccatgcagcgatccggctcatcgccagcgccgatggtgaaatagctgccatgcgggtgctgctccagcatgaaggcaaaatcttcactgcccataaacggcttcacctcgcccacctgctctgcgccaaacagcgctgtcgccacctcccgcaccatggcgttcgtcgccggatcgttacgcaacaccggactgccgttgacgtgggtcagcgtggcggtggcattgaagctctccgcctgggccacggcgatatcatggatccgctgcagcacggtctcgcgcacctgctcattgagggtgcgcaccgtgagcttcatcagcacgtgatcgttaatgatattgggcgcatgaccggcctggatgctgccgacggtcaccaccgccggttcaaacggggtgatattgcgcgagacaatggactgtagcgcgagggtaatatggcaggccaccagcgtggcatccaccgtatgctccggcaccgcgccgtggccgccaacgcccttcacttcaatatgcagcgtatcggaggaggccatcatcgccccgtcgcgcaggccgatcttgcccaacggctgacccggcatattgtgcaggccgaagatggcgtcgcaggggaactggtcaaacagaccgtcctcgaccattacccgcccgccgtacagcaactcttccgcgggctggaaaatcagctgcagcgtgccggtaaactggcgggtgcgcgccagatattcagcggcgtagagcagcgtggtggtgtgcccgtcatggccgcagccgtgaaagcgcccttcaacctggcttgcccacggcttaccgctccgctcctgcatcggcagggcatccatatccgcccgcaggccaaggcgttttttcccctcgccgacgcgcagcgtgcccaccactccggtgcccgccaggccgcggtgaacctcgtatccccactcgccaagcagtcgggcgacctcgctgctggtctggtgctcttcaaagccgatctccggctgctggtggaaccgacgacgcagagcaataaattgcgcctcgttaacctgcaatgcttctagcaacggatgtgtcatttttgttattcctgtgttgtgtttgcacgacactttcgagtttatgcgggtgcctcagcttgcaggcgcgcttttttgttttatattgacgaaaaatcaatgagtgtttttcatacatatcggttatgacaaaaaacaaccggttgttttttgtctacagaggagagtcatgtggagcaccattcaggcgactttagcgtcaccgtacgcgatgtgcgtcagctgacccagccggaaagcgatctgctgacgctgctgtgggtgctggagggaagcgtaaatctggcggtggcggaaggtgcgtcgcagccgctcgccgccgacgggctggcgatcgttaaccgcaaccgtcgctggagcctgcgcagcgccggggccaacgccgtgatgatcctcaccctctccgccagctggctggcccgcctcgataatgccttttttgccgtcgattaccagataacgccgcgcacccgggatgccgatgacggcctgcgccgcctgatgcgccagctgctggtgagcggcctggtcaatcatcctggccattaccgactggaggccaaccgctggctgagtgagatagcgctgctgctggccacgcgctttagccagcccatcgcctccacgccccggcgcgataccgaaaaatggagccggagaatagccagcgtggtggcgcggatcgacgctaactatcagcgtcgcctctcgttgcaggaggtagcggccgcggaatttgtctccgaggcctggctgtcacgcttatttcgcaaagaggtcggggtaagttttgtccagtacctcaacgcgctgcgcctgcgccacgccgccgaccagctattaaccacccgcaaaaccgtccagcaaatcgcccgcgaacagggattcgccagtacgcgaatgatgagcgatttgtttaagcgccagcacggcgtgacgccgcgccagtatcgtgaacagcatcctctggagcttgcccgaccgcgcccgccgcaggccgatcgctggcagccggtggcggccgaccggctgtatgcgcgactcaatgagccggaaccacgcgaccgggaaagtccccccctgccgatcaacccaccgcagacccgggagatcaatctgcgcgatcgtccagcgcgccccgtagcgctgcgccatacccggatggtggtgaccgtgcgcgaactggacgatctgctgcgtgaagatgtgcgccgggaactcgaacagctgcaccacgccctgccggtgtatgccatcgatatcaacgatccctttctcagcagtcggctgttcggcaccggctgggacgatccgcagatggccggctacgcctgctggtacaacctgcagcagatttttagctggctggcggcgatgggctggcaggtgatcctgcacaccggcgtcaccacccgcagtgacctgctgcagcgcttcctgcagctcgccgccaaccattttccgccagccacgctcaacagctggcgctttgtctggcactggtcgccgcaggccagcgaagctgcgcgccaggccgcctggcggcagcagcgcggggtccttcatcgcctgctgccgcagccgcagctggggatctggcaccgctttgctcccagcgatcccgggaacgatccgctgttccactcgccgctgctggcagaggcggattttctcgcctgccaggcagatgccaacgaacagctggatctggcccaggcagacagcagccgcctggcctccagcgaacattacccgctgcacaagctgcggcagatccacagcgccctgcgccagcgtcagctcaacctgccgctgtggctgctctcctggaatacgctgactggcgatacgcgggataccaacggccgcttttttcgcggcgcgctgctgatggataatctgctgggggttgcggaccaggtctggctggcgggcttctggttaaattcaggcctccagggcgaagctcgcgccaacggcaagctcgatacctccagcctggcgctgcactatctgcacggcctgccgcgcccggtttactgggtactctggctctggcggcggctgcgcggcgagatcctggttcacgataaaaacctgctgctgctccaccaccagggtcactaccagctgctgctgcgcaatacggtggtctacaatccctggctctccagcgaagcggcctttatccagcgcttcagccagccctacagcgtgcggctgcagggcctggatggcagctggcgcatcaaacagcacctgttcgatcagcaccacggcgcgttgttcccgctggtggacgcctttcgcagccgcagcggccctgacgccgaggattatcagtggctgatgcatcaggcccgtccggcgctcagcgtggatgaagccaggctcgatggctattggctgcggatcgactcgctgcagagcaatgcgctggtgctgtacgagtttacccctcagtcgcccacagccccctgaagtaaaccgtgaattttccgctggctctccgtcgttgccggattaaagaccagcagggaaagatcgggacggccctccacggcaaaggaggtaaattccaggtcgagcggacccatctgcgggtgattaatgcgcttatagccctcgccgtggccggcgacgtcatggctttgccagaaacgggcgaactcgacgctctgctggctgagctccgcgatcaactggtcagtttctttcgtggcgcccatccgcgtgacgtcggcgcggaaggcgttgacgataagctgccccaccctctgccagtcctccatagtgcagcgggcctccggccgggtaaacaggcggcgcagcacgttgcgctccgccagcggcagttggctgtagtcggtcagcaccctggccgccggtgcgttccaggcgatgacgtcccagctggcggtgcggataatcgccggaatggtgaaagcgtcaagcacccgctgcagccgcggcgtcatatcatccgtcaccgtcagacgcgtctgcggcggatggccaaaggcgagaataaacagatgctcgcgctccggggtggtcagccgcagaccgcgggcgatccgctccagcacctcgcgggaaggcgccccgccgcgcccctgttcaagccaggtataccaggtcgggctgatgctggcgagctgcgcgacctcttcgcggcgcagccccggggtgcgccggcgtcccgccgggaagccaaacgttgccggatcgagacgctggcggcgggcgcggagaaaatcgcctaaagcatggttgtcagaagtgttcatcatctgcctgtgggttctgcctgttagaatttataccccgataatgtctctacttttatagtatgacatcgcaggtaggatacgcctgaaacccattcaggagatccatgatgcgtatatttcttaccggcgcgagcggatttatcggctcacgtattcttccggcgctgcaggcgtcgggccatcaggttatcggcctcgcgcgcagcgaaagcaccgcacaggccctgaaggcggccggcgccgaggtgcatcgcggcacgctggatgccccggagtcgctgctggctggcgtcgggaacgccgacgcggtgatccataccgccttcgaccacgacttcagccgctttgccgctaactgcgagaaagaccgccaggcgatcctggccctgggccaggcgctgcgaggcagcacgcggccgctggtgatcacctccggcacgctgatgggcgacgacgggagcggcgccccggcccgggagtcgttcttcaactcagggcaccccagcccgcgcaccgcctcagagctcgccggccagcagttgctggaggcgggagtggatgtcagggtggtccgcttaccgcaggtgcatgacaccgtgcgtcagggactgctgacctgctacatcgaacgcgcggtcgccaacggggcggtagccctgcgcggcgagggaagcaaccgctggtcagccgcccatgtcgatgacgtcgcacgtctgtatgtcagcgcgctgcttcagggcgcggccggcgagcgctatcatgcggtggccgaagaggggatcgcattacgcgatattgccgcggtaattgcccacggattaaacctgccgctgacccacctggatgactcgcaggtcgacgcctggttcggctggtttgcgccgtttaccgcccttgacctgcgcgccagctcggcatggacccgcgagcgcttgcagtggcagccggttggccccgggctgctggaggacctgcagaacatggactatcataaagtgacactgtcacaataatcgaaacacgctccccctgtatcacacccgacgggtacggctagtcgcccgtcgggtcatcggctttctccccgctatactgaatctattctctagcgtccgcacgtcgtcgccgtttggtcaaccgcggccaaacagagctgactggcgatatcggcgataaaaagttaccatgtttcactatacagactcggttccgcgactattttaatcaattgactgaatactatacgcacccggtaaccgcattatccctcaggcttgttgaaggcggtggtgaatgtctattaatcttaataagatagagttcagctctataatcaaacagaaaatatgcgcctgaaattgtcatctctcctggcagccgtttccctgctgtgtgggccagcttttgccgcccctgcgctccccgaccgcgccgatatccgcgatagcggtttcgtctattgcgtcagcggccaggttaatacctttaacccgcagaaagtcagcagcggcctgattgtcgatacgctggccgctcagatctacgatcgtctgcttgacgtcgatccctatacctaccggctggtccccgagctggcggagagctgggaagttctcgataacggcgccacctaccgctttcacctgcgccgccacgtcccgtttcaacgcacggcgtggtttaccccgacgcgggactttaatgccgatgacgtcatttttacctttggccgtatttttaaccgcgaccatccgtggcacaacgtcaacggcagcagttttccctacttcgacagtctgcagtttgctgacagcgtggagagcgtccgcaagctggataatcagaccgtggagtttcgcctcaagcggccggacgcctcgttcctctggcatctggccacccactatgcgtcaattacctctgccgaatatgccgcccgcttaatgcaggacgaccgccaggagcaactggatcgccagccggttggcaccggcccgttccagctatccgattaccgctccggacaatatgttcgcctgcagcgccaccccggctactggcgcggcaaaccgttgatgccccaggtggtggtcgaccttggctccggcggcaccggccgcctgtcgaaactgctgaccggagaatgcgacgtgctggcctggccagccgccagccagttgacgatcctgcgtgacgacccgcgcctgcgcctgacgctgcgcccgggaatgaacatcgcctggctggccttcaacaccgctaagccgccgctggataaccctgaggtgcgccatgccctggcgctggcgattaacaaccagcgcctgatgcagtccatctactatggcaccgcggagacggcggcgtccatgctgccgcgggcctcgtgggcctacgataatgacgctaaaattaccgaatataatccgcaggaggcccgcgcccgcctgaaagccctggggctggaaaacctgaccctcaagctgtgggtgcccaccagctcgcaggcgtggaatcccagcccgctgaaaacggcggagcttatccaggcggatatggcgcagattggcgttaaggtgattattgtgccggtagagggacgtttccaggaggcgcgcctgatggatatgagccacgacctgacgctctccggctgggcgacggacagtaacgatccggacagtttcttccgaccgctgctgagctgcgcggccatcgcctcgcaaaccaactttgcccactggtgtaaccgggagtttgacgacgtgctgcaaaaagcgctgctctcgcagcagctctcctcgcggatggacgcttacaaagaggcgcagcggatcctcgcccgcgaactgccggtcctgccgctggcctcgtcgctgcggctgcaggcctaccgctatgatatgaaaggcctggtgctcagccctttcggtaacgcttcgttcgctggcgtatcgcgggaaaataccgaagaggtgaaaaagccatgattatttttaccctgcgccgtctgctgctgctgctgatcaccctcttttttctgacctttgtcggtttcagcctgagctatttcacccctcatgccccactgcagggcgcttccctgtggaatgcgtggctgttctggtttgaaggggtgctgcactgggatttcggcgtatccagcattaacggccagctgatttctgagcagttgcgcgaggttttcccggcgaccatggagctgtgcatcctcgccttcggctttgccctgctgataggcattccggtggggatgatcgccggcgtaatgcgcaataaatggcccgataccctgatcagcgccgtcgcgctggtcggtttctcgatcccggtcttctggctggcgctgctcctgaccctcttcttttccctgaccctcggctggcttccggtctccggtcgcttcgatctgctgtatgaggtgaaaaacgtcaccggtttcgcgctgatcgacgcctggctttcggactcgccgtggcgccatgagatgatcgtcagcgccgcccggcatatggtgctgccggtattgaccctggcggtcgcccccaccactgaagtgatccgcctgatgcgcattagcaccagcgaggtgtatgacactaactatgtaaaagcggccgccacccgcggcgtgtcgcgacgcaaaattctactgcgccatgtgctgcacaacgccctgccgccggtgatcccgcgtctcggcctgcagttttccaccatgctcaccctggcgatgatcactgagatggtgttcagctggcctggactgggccgctggctgatcaacgccattcgccagcaggactacgcggcgatctccgccggagtgatggtgattggcgcgctggtgattattgtcaacgtgatttccgatattctcggtgccatggctaacccactgaaacataaggaatggtatgccctacgatagcacctacaaaataaatatttttgtcaattaaaaacaatgagttaaattttaaaattgtgcaattttcctgattttaatacacaattttgtacacattgtttttgacgtcatctccgacagtcatcagttagatggctgtcggagttcccttcctacgtttcccccacaccttctatactttcagtctgaagactggaggtaaccatgtgcggacgttttgcccaatcacagacacgcgaagaatacttggcttatctttcagaagaagccgagcgcgacatcgcatacgaccctgagccgattgggcgttacaacgtggcgccggggactaaagttctactcctgagcgaacgagacgaacagctacacctcgatccggttcactggggttacgcacccgggtggtgggataaaccacccttgattaatgccagggttgagaccgcagccaacagcagaatgtttaaacctctgtggcagcacggtcgtgcgatatgctttgccgatggctggtttgaatggaagcgcgtaggagacaagaagcagccttactttattcatcgcgccgacggccagccaatcttcatggcggcgatcggcagcgtgccttttgagcgcggcgacgaagccgaagggtttttgatagtgaccgcggcagcagatcaagggctcgtagatattcacgaccgccggccgctggtcatgacgccggaagcagctcgcgaatggatgcggcaggatatagggggaaaggaagcctctgatatcgccgccgatggctcagtgtcagcagatcattttatatggcatcctgtttcccgtgaagtgggcaatgtgagaaaccaatctagcgaactgataaatagcatctctatttgatgcttattaagaaggcgacagatataagaaatgccacataaaatagtgcttgcaacactaaacataaactttgataaactacgcatgtcacagcacttcgattaccatgaagcttgtctttgcctatcttatcaaatgtcttttttattttttttctcaagaaaccagtaggatataagttcatgtaatcattatagaattcattgacatctacatttttatcactaacataatttatttcactccctatttcatctcgttccttacagtgctcatggtatttctttaactcttctgcagaaatctgagccatacgaatgctaactgcaactgacgaatgcaccactatagaaaagtattttgctaaaaaaccaaaaatcgcagacgcgcacaaaaataaaacaatatatttaaatccgcctatgccagtgtatggagttaccttatcaatattcgcaataatcaatgcagccgtaccgccaacaccagccaataaccacatactaaacttatctaaaatagatgttatctcgtttgtggccaaactagctccatttatcatgccactatgaaagttattgtgtactacctcatcccattcctcaatggctttttttagtttttcttcttgcatttattcctctggattgaaatttaatttataggcataaactcttatcgtactgaaagaatatctgaaaatcgagttgtatacctcggcgaaagcatttcccgtttcatctgccagacagtctggatcccctgccctgcaaaatacagagttcctcttccgcctttcgcattgagatggtcgagaacttccatcagtttctcgctattcttccgtggtgcgttgtcgtcgaagaggttgagctgggccacgccctgactgtagaaatcccccagcatcacgcctgctttctgatagcgatgtccgtctcgccatattgcatcgaggcatttcgtcgccgcggtgataatgtcccggctgtcctgggttggcgttagcagctttaccgatgcactgttcccatagtacggctcgttcagcgcaaaggggctggttttgacaaatgccgagataaatctgcaatactggtgctcaccacggagtttctccgctgcacgtgaggcgtagctgcatattgcctgcctcatctcatggtattccgtgatacgaccgccgaacgaacggctgcaaacgatttcctgctttaccggtgcgaactcctccagcccgaggcatggttcgccacgcagttcccgcacggttcgctccaacacaacgttgaagtgtttccggataaaacggatatcggtatcagccagttgaagcactgttttaatgcccatagcctccagttttttactgatgcggcgcccgactccccagacctcatccaccggaagcaaagccatcaacttcctctgcctttccagattagacagatccacaactcctccggtctgtcgctgccactgtttcgcagcatgattggccagcttcgccagggttttagtctgggctatgccgacgccgaccgtgaggtgcgtcctgcgcagaaccgtctcgcgaatttccctgccaaaatcggtaaggtcgcgacagttacgaacaccagtcagatcgcaaaatgcctcatcaatactgtaaatttcgcagcgtggagagagttcctccagcgttgtcatcactcggttggacatatcagcataaagctcatagttgctgctaaacgcgataataccgtgccggcgaaacatgtccttttgcttgaaataaggctcccccattttgacgaagggcttcgcctcagcagaacgagcaataacacagccatcattgtttgacagaacgaccaccggccgccccttcaggtcaggacggaaaacagtttcgcaggatgcgtaaaatgagttcacatcgcaaagtgcaaacatttcagccagccgatttgatgatgtaagttacgaccccgaacacatcgagagtatccacgctaccaacgactatcggcgaatatgcagggttcattgggttaagctgaacccgcggatgcagctgcagcttcttaacggtaaattccccatccacagcagcaataacgatatcgccatgaactgctgtccttgagctatccacaaccagaagatccccttcccctatgccggcgtctttcatgctgtcgccggcggctttgacaaaatacgtcgcactggggtgattgattagtaactcattcaggtctatgcgttgctcaacgtaatcctgtgcagggcttggaaaaccacattgcacaaggtcactgtacaacgggatcagcatgatctcacgtaactcaacgggcgtgtaaaactgcataattgactcgctcagattaacactgtttttatatacagtagttttaacagggcgacagatcaatataggttctggctatcaatttttgtcattgccgtaacacattgatgtaacgagtaaggttagtctgaaagtgttttcaggccttagctgtttgatggttttgcgaacaatgcgaggttaaaatttttcagctatggcaatgccttaatagcaaattgctcacctgcgatctcttgcatacggttcgcaggtgagcaaacttaaccggctgggaaatatttataaatcgtctttactcccactcctatcacatcggctaccaaaccaatgatttaactgctcagaccagaaatatctggaagctttaggcatcttcttggaagatagacgagcgcaaagacgcacacagcaatgatgttatgtagtattttccccttgagtgtgcctgctcaaggggattttttatcgccgtattgtactggcaaatatttgtaaatcgtcttcactcccacgcctgtcacatcggccacacgctactggacaggcgcttagtccggtatgtttctcgcgctactactgcttacgttaacgtctggtaatgatctagcggcgcgacgtaaagcggcgttgaaagcaattatagtgaccggccggcgatggtacttcacacggttagaatgactctgaaataaataaacatcttctggatagcgttctcttc

SEQ ID NO: 5344 - DNA, 314 bp, Unknown
  gut microbiota DNA sequence
ccgggtcacccggaagtcggctacaccgcaggcgtggaaaccaccaccggtccgctgggccagggtatcgctaacgcggtcgggatggctatcgccgagaaaaccctggcggcgcagttcaaccgtccgggacacgatatcgtcgaccactacacctacgccttcatgggcgacggctgtatgatggaaggcatttctcacgaagtgtgctccctggccggtaccctgaaactgggtaaactggtggcgttctatgatgacaacggcatctccatcgacggccacgttgaaggctggttcaccgacgacaccgc

SEQ ID NO: 5345 - DNA, 5908 bp, Unknown
  gut microbiota DNA sequence
atcattgatgaatatcacgaacatactactgatgcgctttacaccaccatgaccaccggtatgggggctcgtgaacaaccgatgacactgatcatcaccactgccggctatgacattacatccccttgctatgaaaagcgtactcaggttgtcgagattctgcggagaacccgtaatggcgaggaaaatgaaaccatatttgggctgatttatggccttgatgacgatgatgactggacgactcctgaggcattaatcaaggcaaaccccaactatggcatttcggtaaaagcagattttctccgggctaaacaattattgggtatgtcgacgccagggcagacaaacaagattctgaccaagcatttcaatcgctgggtaagcgcaaaatcagcttattacgacctgagaaaatggatggatgcagccgataaaaaccttaagttgtcagattttgaaggggaagaatgctggctgggtatcgatctggcctcgaaagttgacctcaatgccgtggttccagtttttcgtcgtgaaatagacggaataacacatttttactgtgtttctcctctgttctgggcacccgaagaaaccatttactcgcaggagaccgcgctgaaaagtaccgcagaacgttatcagtcctttgtccggcagggtaagttgatcccgaccgatggtggtgaagttgattacaggctgatatttgaaacgatcctgaagctgcggaataccgtaaaaattgcccaatgccccattgatccttatggcgcgacttcattacgtcacatgcttgaggaagaggggcttgagcctgtcgagataagacaaaattttacccacatgagtgatcctatgagagagattgaggctgcgctcatctcggggagattccatcatgacggacaccccgtcatgaactggtgtatttccaatatcgtcggccagtaccttcccggaagtgacgatattgtgcgtcccgggaaggaagggcggcagaacaagatagatggtgcggttggtttaatgatggggctggggcgcgccatgcttaacagttcagtgatgacatccgtatacgatgaggaagatatagcatgctaatttcagttttgagttttattgtcggcctcactggtgctggattgttatccgtaggtgcctggcttatttctccatcagtgggattgataacaggagggattatttgtctgggctggtcatatatgacaacccgggccttttcctccggcgtcagcaatggcggaggtgaataatgttccttccccagatgttcaggggccgacaatattcgagtaatagcttctgggaagccatgctgggcggggttcgttcaagccagagcaaaactggcatcataatcacgccggaaaccgctcttggactttcagcggtccgggcctgtgtcaccctcctggcggagtccgtcgcgcagctgccgtgcgaactttaccggcgggataaaaatggcgggcgccagcgtgcgacggaccacccggtttatgacctgattcactcccagcccaacaggaaagacacctcattcgagtatttcgagcagcagcaggggttgctggggctggagggaaattgctactcgatcatagaacgggacggaaaaggctacccgaaagaactgatccccattaacccgaaaaaggtgattgtgctgaaagggctggacggtatgccgtattaccaactcccggaagtcggcgaaattctgccgatgcgcatgatgcaccatgtgaaggtcttttctctggatggctatatcggcagttcccccattcagacgaacgccgatgttctggggctgaacctggcggttgaggagcatgcggccgcgacattccggcgcgggacaacgatgagtggggtgatagagcgtccgaaagaggccgcgaccattaaaagccaggatgctattgatcgcctgctggcgaaatggaccgagcgccattccggtatacacaatatgttctctgtggcattgctgcaggagggcatgagctacaaacaactgtcgcaggataacgaaaaggcgcagctgctacagtcgcggcagtggggcgtggaagaggtctgccggctctataaaatcccgccacatatggtgcagatgctggcgaaagcgaccaacaacaacatcgagcaccagggcctgcagttcgtgatgtatacgctgctggcctggctgaaacgccatgagggtgcgctgcagcgcgatctgcttctgcccagcgaacgccgcgatttgtatatcgagttcaacgtttccgggctgctgcgaggagaccagaagtcacgctatgaatcgtatgcgctgggccgccagtggggatggctatccactaacgatatccggcgtatggagaatctgccgccaattgccggcggggacaaatacctgacgccgctcaatatggtcgacagcgcgacgatccttcctggcgataaatcgccgacagcgaaacagctggccgaaattgaaacccttctggccagagcctgattatttcccgctgcgcgggatgacctggaagacaatatgacaacgaaattaattaacctgccgcacctggcagatatggtctttggcgtgccgcattatgtgacgcggcaaacaatggactccgtgaaagcggtgctcatcccccgtattcaggggatcaccgaagatgccgtcattcagatggcgctgaatccgggtaaatcgcctgccgctgagcaggtccagcccgcaggcggggtggcggtgatccccgttcacggcattcttgttccacgccgggggcagattacggcgatgtgctccgagctgaccagctacgagcggatccgcgggcagttgcaggcggcgttaaacgacccatcaatcagcgaaatcgttctggatattaactccggcggcggcgcagcggtggggtgcaaggagctggccgattacatttatcagtctcgcgacacgaaacccatcacggcgattgtgaactacagcgcgtattccgccgcgtatttcatcgcatcggcctgcagcaaaatcatcgtcagccagaccagtggcgtggggtcgattggtgtgatcatggagcacctcgatacgtcgaagatggaagaaaaaatggggctgacgttcaccaccatttaccggggagataacaaaaataacggcacccaacatgaaccactgagtgaagagtcgctgggtatgttccagggcatgatcgacgaaatgtacgagacgtttacggggtcggtggccgaatatcgcggcctgaatcagcaggccgtcattgatacgcaggcggggctgtattttggccctggcgctgtgtccgccggcctggcggatgaagtctctgacccccaggcggcgatcaatgctatcgcggcaaagtatcagcaaccccgtcaaaaaacctccattcagatgcaggcagccgcgatggatctgcaaaccaaaatgtaacccggcgcaaacacaaaccgcgtcaccttaagcagccagcaggctgctttttttatgtctaaaaagagagaaataaaatgccacatattgaagaattgcgtcgtcagcgtgcgggtatcaacgaacaggttcaggccctggcaaccattgaagccagcggcagcacgctgactgcggagcagctgacggagtttgcgaacctgcagcagcagttcactgatatcagcgccaaaattgaacgcctggaagccgccgaacgtgctgcggcgctggtcgcaaaacccgtgaaagcgactcagcaggcccccggcattattgttaagcaggagccgaaacagtacaccggtgctggcatgacccgactggtgatgtctgtcgccgcaggcgcagggaatctgcaggacgcggcaaaattcgcttcagaagagctgaatgaccagtccgtatcgatggccatttccaccgctgcgggttccggtggagcgctcatcccggagaacatgcaaaacgaagtcatcgagctgctgagcgaccgtaccattgtccgtaagctgggtgcccgctccgttcctctgcctaacggcaatctgacgttaccgcgctcggctggcggtgcaacggccagctacaccggcgaaggaaaggatgccaagacgtctgaatcaaaattcgacgacgtaaaactgagtgccaaaaccatgatcgccctggtcccgatgtcgaaccagctgattggtcgcgccggttttaacgttgagcagctggtcctgcaggatattctgaccgccatcgctgttcgtgaggataaagcgtttatgcgcgatgacggtaccggcgatacaccgattggtatgaagtcgcgtgcgacgcagtggaaccgcctgctgccgtgggaagcgggttccacgatcaacctgaacacggttgatgagtacctggacaagattattctgatggcgatggatggcaacagcctgatgatccgttgcggctggggtatgtcgaaccgtacctatatgaagctgtttggcctgcgtgacggcaacggcaacaaagtctacccggaaatggcacagggtatgctcaagggctatccgattcagtataccagcgcgatccctgttaacctgggcgaaagtggtaaggaaacggaaatttatttcgccgacttcaatgatgttgtcatcggtgaagatggttccatgaaggtcgatttctccagagaagccacctatctcgatgcagaaggtaacccagtttccgcgttctcgcgtaaccagtcgctgatccgcgtcgtcctcgaacacgatatcggcttccgtcatccggaaggcctggtgctgggtaccggcgtcctgttctaacccaccccctctgttaataaagcccgcatatgcgggcttttccctttaaggagaatgctatggctgcgaaaaataaagcagtggagccggaagaaacggtcgtacaggacaaccatgcgaccgagaccgcacaggataaccgtgcgaccgtggtcgcacaggcagaacgtaaatccgttgtgttcctcggtccgcatagccgttattcccgtggtgatatcgcgtggtttgaaggatcgcacgccgaagagctggttaagcgccgtatcgcggtatggccgaaggatgccgaacgcgcgctgaaaccgaagccgggagacagcgattttgatactgacattggatgatgtgaaaacccagctacgcctggaactggatttcacggagcatgacgccatgctcacgcaaatggtgaacgccgcacagcggagcatcgagcgtgattattactgcaagctggtcaccagtgatgaagagttgcaggcactcccggaagccgtccgcggatttatcgcggatgaagatatccggctggccattcagtttctggtcagcgatgcgtatctgaatggccataccggacagtggctggaaaccgctgcggtgaggcatcttcttttccccctgcaggagcatacgctatgagcctgaaaccgggtgatatgaactgtcgcattgcgattagctacgttcagtccggtcgggggccgctgggcgaaccgctgccggaaaagctggttgaatcgggaaaagcgtgggcaaaacgggagctggtatcggggcggaaagtccgcacgctggatcagcagcaggtggtggaaacctgcctgtttacggtctatccgggtgtgctggttgatatcgactggaaaatcacgacgaaaaatctggtttataccgtccgtaatatcgaccgcaaaacggaccgaatcattatcacgggggaggctgacggtcggcatgatagagctggcgattaagggtgcgctggagcgcatcaccggcatgaatgcgtatccgcttttactgccggacacggtccaggaag

SEQ ID NO: 5346 - DNA, 3170 bp, Unknown
  gut microbiota DNA sequence
cagcgcgagccacaatttatccatctgttcgcgggtgtcgttattcagcggcgacagccacaggtgcgcctgcgtcagggtacgcagtcgataatcgatgccggcatcgacgttcataatatcgcaatgctgcttgatggcgtcgatcgccggcagaaaacgggcccgctgcaggccattacgatagagttcatccggcggaatattggaggtcgccaccagggtgatgccgcgggcgaacagggctttcatcagcccgcccaacagcatggcgtcggtaatatcggagacaaaaaactcgtcgaaacagagcacgtcggtttccgctttaaagcggtcggcgacgatctccagcgggtcgctatgtccctgcagggtggtcagctcttcgtgtacgcgcagcatgaaacgatggaaatgcaggcgctgtttacgctcgcccggcaggctctggtaaaacaggtccatcagccaggttttgcctcgccccacgccgccccacatatacaggccgcggacaggtgccgtcccggcagccggctcgcgcttacccagcagtttgccgaatttcgcgcgcaaaccgccgcctgacgcgaccggcgcgggctgcgtctgcagttcctggtaaatggtatcaaggcggctcaccgcttcttgctggacgtcgtcgggttgatggctgccctctttcagggctaaaaggtaacgcgatgttggagacaggctttgcatgatctaattgttattccttgaaaaccgtaatgccgaagctcacgattgacgaaaaaaaggccgttctacactacgcgatgatacgccaggattccacttctgtggaattagcggttatagtggcactatcgggcgcaggcggagagcctaagagccaccctacggaaccacaatacaacgggagatgttcatgacctgggaatacgcgctaattgggttagtcgtcggtatcatcattggtgccgtcgccatgcgtttcggcaaccgcaaactgcgccaacagcaggcgctgcagtacgaactggaaaagaataaagccgagcttgaagagtaccgtgaagagctggtgagccactttgcgcgtagcgccgaactgctggataacatggcgcacgactatcgtcagctatatcagcatatggcgaaaagctctaacaacctgctgccggactcgatggcagacgccaacccgttccgcaaccgtctggaagagtctgaagccagcaacgatcaggcgccggtccagatgccgcgcgactactccgagggcgcatccggtttactgcgcggaggcgcaaaacgcgattaagcctcgctgcgattaaaatattctccgggcgcgcccgtcgcgcccgctccttcccccacttcccggctacaatttaaaccagtccccacgttgttacctgtgcaaaaattcaataacatcaggttattcaggacatttttccatacacctcaggttacgagagccagcatctaatgaagaaacagactttgctgttgagtgcgttagcgttaagcattgggttatcgttgtcggtcctgcctccggcagcggcatccttaccgactcaggtgcccggccagggcgcgttaccaagcctggcgccgatgctggaaaaggttctgccggcggtggttagcgtacaggtggaaggcactgcctcgccgacgctcaatatgccggaagagctgaaaaaatattttggcgataacgccccgcaggagcaggcgcagccgtttgaagggctcggctccggcgttatcatcgacgcggcgaaaggctatgtgctgaccaataaccacgtcatcaatcaggcgcagaagatcagcgtccagctgaacgatggccgtgagttcgatgccaaactagtcgggagcgatgaacagagcgatatcgctctgctgcagctgattaagccagaccacctgacgcaaatcgccattgctgactctgataaacttcgcgtcggcgacttcgccgtcgccgtcggcaacccgttcggccttggccagaccgccacatccggcattatctctgcccttggccgcagcggcttgaaccttgaagggctggagaatttcattcagaccgacgcctcgattaaccgcggcaactccggcggcgcgctgctgaacctcaacggcgagcttatcgggatcaacaccgcgatcctcgcgccgggcggcggcagcatcggcatcggctttgccattccaagcaatatggcgaaaaccctcgccgaccagcttattcagtttggcgaaatcaagcgcggcctgttgggcattaaaggcatggaaatgagcgccgacatcgccaaagcgatgaatctcaacgttcagcgcggcgccttcgtcagtgaagtcctgccaaactccggctccgccaaagcggggattaaatccggggacgtcatcgtgagtctgaacggcaaaccgctgaacagtttcgccgaactgcgttcgcggatcgccaccaccgaaccgggtaccaaggtcaaactgggcctgctgcgcgacggaaagccggtcgatgtcgaagtgaccctggataagagcacctcctcaaccgccagcgcggaactgattatcccggcgctgcagggggcctcgttcagcgacggccagatgaaagatggcaccaaaggagtggtgatcgataatgtggataaaggcagcgccgccgcccaggtcggtctgcataaggatgacattatcattggccttaaccggcagcgtattcactcaattgccgaactgcgcaaagcgctcgaaggcaaaccgccggtcatcgccctgaacgtgatccgcggcaacgaaagcatctatctgctgctgcgctgattgtctctccgggcatcgccgccatgtgcgatgtccggacaactcatgctatgctgcgcctgaccattcattaacgatatctgcatcatgcctggaaagttattacgttcagtactcatcggtttgcttgtcgggggtctgctgctggccctgatgccctcgctgcgccagtggcagttggcgccgactacccagaacgatacggcagacgactccccggcgagctataacgccgcggtgcgccgcgcggcgcccgccgtggtgaacgtctataaccgcgcccttaacagcaccagccataatcagct

SEQ ID NO: 5347 - DNA, 58395 bp, Unknown
  gut microbiota DNA sequence
ctacgatattctatattctgccccacggggaaggatgagaagcttcgaccaaggttcgactcgagcgaagcgagagaacgttgccgcaggcaacggcccgaagggcgaagcgctttagcgccgagtaatccttcccccaccactgttgcactctcagccacctgttctgctgtctcatcgctcgcgcttcgcttagcgaggctacaagtggtgccgtctggtagcccggacaggtgcgcagcaccgcctccggaaaaactcacagcggtggcaaccgcctttttaccggcgagcttttcaccaccgaggtgttacactgcgcatactccgccagaccgtccagcagggtatccagctgggcaatatcgcgcaccacgagacgcatcacaaaacaatcttccccggtcaccttgtcactttcaatacattccggcatcgcctggatatatttatccaccttctgcagcagcccaggcagcggacggacccgcaccagcgcctgcaggctatagcccagcgcggcgagatttacccgcgccccatagccctgaatgacaccccgctcctccaggcgcttcacccgctcggcggtgctcggtgaggtcagccccactcgcgcgctcaggaccttgagcgaaactctggcatcctgagtcaggcaggtgaggatcgcccggtcaatttcatcaagtacgtcattcatatatttcacctaattataaaaggcacttccccccttctaccttaattcagccatatcaccctgtcagggtttttcgcacaataactaaaaaatggtggaggtgaaaaatgcaacttacccgcggcgtctggcagatgagcctggcaatgataatctccggctcgatcggcgcgttcgtgctgctctctggtttgccggtgactgatgtggtgttctggcgctgcctgattggcgcgctaaccctgctggtgtttatcgtgttaagccgccagcccttcagccggctaacgcgtttcactctcgctctggcggtgattggcggcgcggcgctggtcgtcaactggctgctgctgtttgccgcctattcgcggatctcaatcggtatggccacagtggtctataacacccagccgtttatgctggtactgatggggatggtgctgggggaacgggtcagcgccgtgaaatggggatggttactgctggcctttggcggcgtagtgatcctgttgtcgagcgagctgatgcctgcacacgaagaggggcttaccaccggcgtgttgctggcgctgggcgcggcattcttctatgccctgaccgccatcatcgcacgcaaactgcatccgctccccgcgcaacatatcgccttcattcaggttctcgtcggcgtcgtgatgctgctgccgctggtgcatgcccccgaattgacggccagcttcccctggcgctatctgctgatcctcggcatcgtccataccgggatcatgtatcagcttttatatagcgcgatacagaaactgccgacgcccgttaccggttcgctctcctttatttatccgctggtggcgatggtggttgactatctggtcttccaccatgcgttatccgcggtgcaattgctcggtgggatgcttattctgtttgccgccgcagggaataatctcggctggggcgaaaaaaaaccccgccgcggcggggtcagtgagcagtcgcgggccagttagcgacgggcgcggacaatctggtatttgcgcgtcaggtattcgaccggcgcgctccagatatgaaccagacgggagaacgggaacagcaggaacagggtcatgcccagcaccaggtgaacgcggaaaataaacgccacgccatccagatgctgtgacgcgccgccgtggaacgtcaccaccgactgcgcccagccgaccagtttcatcatttcactgccgtccatatgctgagcggagaacgggatcgtcagcaggccgagcgcacactgcaccatcagcaacgagaggatcagaatatccgctccggtggtggtggcgcgaacgcgcgggctgagcagacgacgcttgagcagcagtaacccgcccaccagggtcatcacgccgcaggcgccgccggcgatcatcgccatcttctgcttgacgtcgatcggcaggaaggactcatacatccagtgcggggtcagcatgccgaggaagtggccggcgaaaatacccaggatgccgatatggaacaggttcgacgccaggttcatccccttacggtccagcatctggctggaggcggcgcgccaggtgtactggccatagtcatagcgcaaccagctgccaatcaggaacaccgaacccgcaatgtacggataaatgtcaaagaagaacatattcaggaagtgcattattgctgtcctccgttagagatattcagatattgcggggccacggctccggcaaaacgacgctggtgagcggaaatttccgactcgccgcagccctggtcggcaaagaatttgacctgttcttcttcccagacggcgtccagcgcctgcggcgtatcgtcgcgcgcttcgtcggcaatcttctccgccaccttctggctgtcgacctgcgtattggccagcttcagcaacagctcgaacagcaccgcatagcgactttcgcgctgctgcaggcgcgcgctgagcagaccgaggatcggcgcgacgtcccgcaggccgccaagcgcttcctcttccggcagctgcgccagatactccagatatagcggcagatgatccggcagctcatggctatccagcagcaggccgtggcgctcgtactgcgccatcaggtcgaccatcgcctgcccgcgatcgcgggattcgccgtggacatgttcaaacagcagcagcgaggtggcccggccgcggtcaaacagttcgctataggccgcctgggcgtccagcggatcctgagccactaaatcgcgcaggaaaacgcccagcgcgtgggcatcctctttgctgagtttctctgatgacgcgagcgcctcgaacatttcctgctgatgctgccataaggcagcgtcaggatattcgagcagacgcgatacaatcacgagttcaatcatgcgtgcggctccgttttgctggtcacgtcgatggcgtcgatgcgacggctgttgaacaggttgaactgactgtcagagccgtggcagccatcgccaaagctaaagccgcagccgtttttctccggaaacgcttctcgcgcctgttcacgatggctgctcggcaccacgaaacgatcttcgtagttggcgatcgccagatagcgatacatttcctgggcctgcgcttcgctcagccccacctcttccagcgcgcgggtatcaacgacgccgtcaacggtttccgcacgcttatagtggcgcatcgccagcattcgtttcagcgccagcagtaccggctgggtatcgcccgcggtcagcaggttcgccagatattgcaccggaatacgcaggctttccacgtccggcaggatcccgttgctacccagttcacccgcatcggcggcggactgaatcggcgacagcggcggcacgtaccagaccattggcaaggtgcgatattccgggtgcagcggcagggccagcttccagtccatcgccattttgtaaaccggcgactgctgcgcagcttcaatgaccccctgcggtacgccatccttcagcgcctgctcgatcactttcggatcgttgggatcgaggaacacgtccagctgacgctgatacagatctttctcgttctcggtgctggcggcgttttcaatcgcgtccgcgtcgtatagcaggacgccgagataacggatacggcccacgcaggtttcggagcacaccgtcggcatcccggattcaatacgcgggtagcagaagatgcatttctcggatttcccgctcttccagttgaaatagatcttcttgtacggacagccggtgatacacatccgccagccgcggcacttgtcctggtcgatcagtacgatgccgtcttcttcacgcttatagatggcgccgctcgggcaggtcgcaacgcaggccgggttcaggcagtgctcgcacaggcgcggcagatacatcatgaaggtgttttcgaactggccgtacatcgccttctgcatgttgtcgaagttctgatctttggcgcgtttttcaaactcgccgccgaggatttcttcccagttcggaccgctggtgatcttgtccatccgctggccggtgatcagcgagcgcggacgggcgatcggctgatgtttgctctccggcgcgttatgcagattctggtagtcataatcaaacggctcgtagtaatcatcgatgcccggcagatgcgggttggcgaagatttttcccaacagcatcgcgcgattgcccatgcgcggctgcagtttaccgttgattttgcggatccagccgcccttccatttttcctggttttcccagtcgttcgggaaaccgacgcccggcttactttccacgttgttgaaccaggcgtattccatcccttcccggctggtccagacgtttttacaggtcaccgagcaggtgtggcagccgatgcacttatcgagattcagcaccatgccgacttgtgaacgaattttcattttacgctctcctgtacctggtcgttgccttcgccgtctaaccagttaatgttcttcatcttacgtaccaccacaaactcatcgcggttggagccgacggtgccgtagtagttaaagccataggccaggtggccgtagccgccgatcatgtgggtcggtttcggcgtaatacgggtgacggagttatggatccccccgcgctgaccggtgatttcagagcccggcaggttcacgatacgttcctgcgcgtgatacatcatggtcatcccggctggaacgcgctgactcaccaccgcacgcgccgtcagggcgccgttggcgttgaacacttcgatccagtcgttatcttcgatacccagatctttcgcatccgcttcgctcatccagacaatcggcccaccgcgcgacagggtcagcatcagcaggttatcgctgtaggtcgagtggataccccatttctggtgcggggtcaggaagttcagcgccttctccgggttgccgttggacttctcgcccatcaccgctttcaccgaacgggtgtcaatcggcggccgatagaccagcaggctttcgccgaagtcgcgcatccactggtgatcctgatacagcgactgacggccggacagcgtgcgccacgggatcagctcgtgaacgttggtgtaaccggcgttgtaggagacatgctcatcttccaggccagaccaggtcgggctggagataatcttccgcggctgcgcctgaatgtcgcggaaacggatcttctcgtcttctttgttcagcgcgaggtgcgtatgctcgcgaccggtgatctcgctcagcgcttgccacgctttcaccgccacctgaccgttggtttccggggccagggtgaggatcatttccgcggcgtcgatggccgtttccagcttcggctggcctttcgccgggccttccgccttggtgtagttgagcttacgcagcagatccatctcgctctgggtgttccaggcgatgcctttcccgccgttaccgatggtttccagcagcgggccgatcgaggtgaaacgttcgtaagtcgccgggtaatcacgctcaaccggaataatatgcggcgcggttttcccggggatgagatcgcattcgccttttttccagtctttgacatccagcggctgcgccatttccgcggcggagtcgtgctggatcggcagggtcaccacgtcggtttctttaccgaggtggcccacgcacacttcagagaatttcttcgcgatacctttatagatctcccagtcgctcttcgattcccaggctggatcaacggcggccgacagcgggtgaataaacggatgcatatccgaggtattcatgtcgtctttttcgtaccaggtggcggtcggcagcacgatgtcggagtagagacaggtgctcgacagacggaaatcgagggtcaccaccagatccagtttgccgtcgaggccgttatcccgccattcgacttcttccggcttcacgccgccctgcttgcccaggtctttgccctgaatgccgttctcggtacccagcaggtacttgagcatgtattcatggcctttaccggaggagcccagcaggttggaacgccagataaacaggttacgcgggtggtttttgccattttccggctgctcggccgcaaagcgaatcgagccctctttcagcgacttcacggtgtaatccaccggggtcatgccggcttttttcgcttcgtcagcgatacgcagcgggttgacgccaagctgcggcgccgacggcagccagcccatccgctctgcgcgcacgttaaagtcgatcaggtggccgctgtaacgggatttatccgccatcggcgacagcagttcctgcgcggtcaccgtttcatagcgccactggctggagtggttatagaagtacgaggtactattcatgtgacgtgccggacgctgccagtcaagggcgaacgccagcggctgccagccggtctgcggacgcagtttttcctggcccacatagtgcgcccaaccgccgccgctctgaccgacgcagccgcagaagatcagcatattgatcaggccgcggtagttcatgtcgaggtggaaccagtggttgaggcccgccccgacgataatcatcgaacgaccgtgagttttatcggcgttatcggcaaattcacgggcggtacggatgatatgcgcgcgggagacgccggtgatcttctccgcccacgccggggtgtaggctttcacttcatcgtagccggcggcgcagttgtcatcgttcagaccgcgctccaggccgtagttagccatggtcaggtcatacacggtggtgaccagggcggtagagccgtcggccagctgcaggcgtttagccggcagtttgtgcagcagaatgttttccagatcgactttgttgaagtgctcagaaccttcgccgccgaagtacgggaagccgacgttcgccacttcatcatggctgcccagcaggctcagacgtagctcaatctcttcgccagttttaccgtcgcgctgttcgaggttccatttgcctttgtcgccccagcggaatccgagggaaccgttcggtacggtcatgtcgcccttctcgtcaaaggcgacggttttccattccggattgttctcctgaccaagggaatccacgaggtcggatgcgcgcagcgtacggccggcggcataataaccgtcgcgctcctcgagcatcaccagcatcggcatgtcggtatagcggcgcacatagtcggtgaaatactggctcggcttatcgaggtggaattcacgcagcatcacatggcccatcgccagcgccatcgcggcatcggtaccctgcttcggcgccagccacagatcgcagagtttggcgatttcggcgtagtccggagtgatggctacggttttggtccctttatagcggacttcggtaaagaagtgcgcatccggggtgcgggtctgcggcacgttggagccccaggcgatgatatagctggagttataccagtcggcggattccggcacatcggtctgctcgccccaggtcatcggcgaagccggcggcaggtcgcagtaccagtcgtagaagctcaggcaggtgccgccgatcagcgacagataacgggcgccggacgcgtaggagaccatcgacatcgccgggatcggcgagaagccagccacgcggtccggaccgtaggttttgacggtatagacgttggaggcggcaatcagctcattcacttcctgccaggaggaacgtacaaaaccgccgcgaccgcgggcctgtttgaagcttttagctttgtcggcgtcttcgataatcgacgcccatgcctcaaccggatcgctatgctgaactttcgcttcccgccacatcttcatgaggcgtttacgcatcagcgggtatttcaggcggttagcgctgtacaggtaccaggagtagctggcgccgcgcgggcaaccgcgtggttcgtggttcggcaggtccgggcgggtgcgcgggtagtcagtctgctgcgtttcccaggtcaccagaccgtttttgacataaatcttccagctgcatgagccggtgcagttgacaccgtgagtggaacgcacaattttgtcatgctgccaacgttgacggtatccatcctcccagtcccggttggtgtttagaagctggccgtgcccatcggcaaaggtttcacccttctgtttgaagtagcgaaaccggtccaggaatttactcatcgggtttctcctgatatggagcctgacggctctctgataaatcgacattgctggatttgcagcgaaggtaacgctatgaaagagggcgagaattgatagcgatcaatccgaactggcttgttactgcgcagcaaaacctcgattaccaccaaggtggtataagatgttattttttaacttgttgttttttaatggttttcacctcaaaaagcggcgcctcaccgggatttgttaacaacggaggtattaaggggtagagccatttcactggcaagcccacctgttctggctcagcggtcgatgcggacaatattctcccatagtatgttgtaactaattaagcggttaaaaaaggcgcctccgtggggagcgcgcctttttatacgccaacgttaccgcggccggattactgacgcttacgaccgtataccgcccaggtgatcaccacgcaggcaatatagaacacgaggaacactttcatcgccccggccggcgagccggtcagatccagcgagataccgaacgctttcggaataaagaagccgccgatagcgccaatggcggagataaagcccagcgccgccgcggtatcggtcgccgcctcgcgcatcgcctgcgcttcgctgccgccctgggccttcacgcggtccatagtcagcttacggaagatcacggagatcatctggaaggtggaggcgctccccagcccggcggtcaggaacagcaccataaacaccgcgaagaaggcgataaagttaccgccctggccgttggtcggcagggtcaggaacagcagcgcgcagaagacagccatcaccacaaagttgaccagcgttacgcgggtcccaccgaggcggtcggagatcgccccgcccatcgaacgcgccagcgcgccaatgaacgggccgaagaaggcgtaatgcaggatctgcacatccgggaactgagtttttgacagcatcgcgaacccggcggaaaagccgataaaggagccgaaggtcgcgagatagagcagcgccataatccacagatgcaggcgcttaagtaccggcaactgctcgctcagcgacgctttcgaagccgacaggtcgttcataaagaaccacgccgccagagtgaaaataatcaggaaaggtacccagatccacgcggcgttttccagatacagcatcgagccgtccggttgctcgctaccgttaccgccaaaaacggcaaagatagagatcgagaccaccagcggcgcgaccagctgcatcacgctgacgcccatattgccaagtccgccgttaacgccgagcgccccgccctgcttcgctttcgggaagaagaagctgatgttagccatactggaggcaaagttggctccggcgaagccgcacagcagagagataatcacgaagatgctaaacggcgtagaggtatcctggaccgcgaagcccagccagacgcatggcacaatcatgatcccggtgctgaatgccgtccagcgacggccgccgaacagcggcaccataaaggcgtaaggcacgcgtaataaggcgcctgacagcgccggcagcgcggtcagcataaacagctgatcggttgtaaactgaaagcctactttgttgaggttaacggcaaccgcgctgaacaacatccaaacgcagaacgccagtaacagacagggaacggagatccataaattgcggcttgccacacgatggccgcgctgttgccagaattcaggatcttcaggccgccagtcggttatgaccgagcggttagccttctccgggagggaagattgactcatagatacctctgattattcatatttcctgccgctaccttaggggttacccggagcggtaagttgatataaatcaaaggaaaagcgcgagctaatttgtgcaaaaataaaccatgcctccaagtgagtagagaatggcggggaaaaaagtgtggtttttcacgctgctgccgggttgcgtataatcccccccctaacatcgcctaccaccgacaattaaggagtaactctttgggggtatgggtatactccaggggatagtcgagaataagcgccactcccggagacatgaccggtcaggagccacgcattccatgttaaaacgtctttttaccccgctgacgctggtcaatcaactggcgttaatcgtgctgctcgccacgattattggcgtcgccggcatggcgatctccgcgcgcctggtgaacggcgtgcagggcagcgcgcacgccattaacaaggccggttcattgcgtatgcaaagctaccggctgctggcggcgatcccgctgaatgaaaacgatcaaaaactggtggcggacatgaccgccaccgtcttcagcccggagctgcaaaattccgcccgccgcgacggccaggaaatccagcttaaagccctgcagcagtactggcagctggcgctggcccccggcatgcagcgcgcagtcaatcaggcggaagtggcccaggatgtcgccgactttgtcgatcgtatcgaccagttggtcaccgcattcgaccacaccaccgagcagcgtatcgaacgggtggtctggatccatcgcatcctcgccattggtatggcgctgctgctgatcttcactatcatctggctacgcgcccgtctgctgcggccgtggaaacagctgctgagcatggcgcgcgcggtgagtcagcgtgatttcacccagcgggcgcacatcagcggccgcaacgaaatggcgaccctgggcatggcgctgaataacatgtcggaagagctggcggaaagctacgccgtgctcgagcggcgggtgcaggagaagactgccggactggagcagaagaacgagatcctcgctttcttatggcaggccaaccgccggctgcactccagcgccccgctctgcgaacgtatttcgccggtactgaatggcctgcaggggctgacgctgctgcgcgatatcgaggtacgggtttacgacctggaagacgaagataatcaccaggagtttacctgccactcggatgatgactgtgatgataaaggctgctacctctgtccacgcaatctgccgccgctgccggatgggggaacaacgctgaagtggcggctgtcagatgcgcatagtcagtacggcatcctgctggcgacgctgccggttggccgccatctcagccacgatcagcagcagctggtggataccctggtggaacagctgaccagcaccctggcgctggaccgccatcaggagaagcagcagcagctgatcgtcatggaagaacgggccactatcgcccgcgagctgcacgactccatcgcccagtcgctatcctgtatgaagatgcaggttagctgtctgcagatgcaaggcgacgccttgccgacggaaagccgccagctgctggggcagatccgtaacgaactgaatacctcgtgggcccagctgcgggagctgttaaccaccttccgcctgcagttgaccgagccggggctgcgcccggcgctggaggccagctgtcaggagtacagcgcccacttcggctttacggtgcagcttgattaccagctcccgccgcgctttgtgccctcgcatcaggcgatccacctgctgcagatcgctcgcgaagcgttgagcaacgctctgaagcatgccagcgcgaccgaagtgaccgtgacggtgtcacaacgcgataatcaggttcgtctggtggtagcggataacggccgcggcgtaccggaccacgccgaacggagtaaccattacggtttaattattatgcgggatcgcgcccagagcttgcgcggtgactgtcaggtacgacgccgggaaatcggtggaaccgaagtgatcgtcacgtttatcccggaaaaaacgttttccatccaataaggagaccctcatgagtcaacaggaacgggcaactatccttctcattgacgaccatccgatgctgcgcaccggcgtgaaacagttgatcagcatggcgccggacatccaggtgattggcgaggccagcaatggcgcgcaaggtattgagctggccgagtcgctggatcctgacctgatcctgctggacctcaatatgccgggcatgaacggtctggagacgctggataagctgcgtgagaaatccctttctggccgggtagtggtcttcagcgtctccaaccatgaagaggacgttgtcaccgccctgaagcgcggcgccgatggctatttgttgaaggacatggaaccggaagatctgctgaaagcgctgcagcaggcggccgccggagagatggtattaagcgaagcgttaacgccggtgctggccgccagcctgcgcgccaaccgcgccacctccgatcgcgacatcagccagctgaccccgcgcgagcgcgacattctcaagctgatagcccagggactgccgaacaaaatgatcgcccgtcgcctggatatcaccgaaagcaccgtcaaagtacacgtgaagcacatgctgaagaaaatgaagctcaaatcccgcgtggaagcggcggtatgggtccaccaggagcgaatcttctaaggcgagtccgtccaggagacgcctggcgtggtaaacttgaccagcggctcggtcagcgccagggcgatctcattggaggagacgcgctgcccctgtttatcctccaccaccaccgacaggcgccagcggttcgcggcgcccggttcactgttccacaccggcataatgatgctccagccatcggggctgctggcatctaccggcggcgtcaggctgagggcctgggtgtctccctgccagtgcagcgccttgatgccatgcagactatggatctgcagcttcaactgcaccgtctccccggactgcagatcccagggcggcgtggccagatagaccgtcagatttttgcgctgacgatactccaccaccggcagattatcccgctccggactatcgaagcggctcccgcgcagcgagttgctgatcgccacctcgtctgccgcaagctgctgcttaaggggtacgccaaagcggtagtttagcttcaggcccacattgttctggctgacgccattttccccctgcttatgcttagcggtcaccgtgaccagcgggaccggggtgtaattgagcccaacggagacggccaccggattatggtagccggtgccggagtgaaacagatcgacgctatcgccgaaatactgttcgacgctgacgctggtgttgatgtgctggtagaacggcagccgcgcctgggcggtgacgtcataccctgcggccatccgctgctcctgagtctgattatcgcgtagctgccagtcgcccagcggatggtaatagtttgccgacaggcggagatattctccccacgcttcggcgccaacgctgccgcgcgccaggctttcgctcagcactttatcgtaaaacgagttatagcccagcagccaaccgccaacccgccaacgctggccaagcccgatgttgcccaccagatcgtgctcgcgccgggtcaccgagtactggttccaggtcagataacggtcgttatcctgcaacggcacgaaccagctccctttactgccggtgaatttcccctctttatcgaccagcaggtcgacattggcgttgccccacggcgagagccaactctccagctgatgactcacttcattgccgattttactgatggcaaacagctgcgcctgttcacccgccgtcagaccattgtcgctcatgctggcctcgccaaacttcttcgccacttcggcaaagtgccgggcgtcgtcatcaacctggggagcaatccccatatcgggcagcggatcttgcgcttgcgcagggcgggtggtgtcgctggcggtcagcgcccagacgggaacgcccggcaacagcaggagaaaggtcaacgttggcaacaaacggaacgacacaggcattaacagagtttgcgcaagctcacaaaaatggatagaagtgttagtttatcgttttttccctgctcccgcagccctgtgggcaattccaggaataagctgaaaccggttgggtaaggtgccgcccaaccggaggcgtcgctgcgcgccaccgttacgcccgggttcgttgcgccgccagcagcgcgttgagctccggcacgcaagagccgcagttggtcccgcatttcagcttcccacccagcgccccgacgctggcgcagccgctggcgatggcctcgttaattgaccattcccccaccccaaagcagctgcagacgatccgcccccgcggcgcgacggcggcgcccggtcggccgctaagcaaggcatgtcgttgggcagcatcggacggcggcgcggcaaaggcagcgcttatccatgcgcaatccaccgccggctcgcgcgcatcgctccaccagccgagcatcagccttccctgatgccaggccagcaggttccacaccgcgccgccgtcagccacctgtaactgccagccgcgccgggcgcaccacgcgctgagccactgtcgggcagatgcctccccggccagcgagtagtgcagcacgcctggcgtcgcccgccgccgccagtgccaggccgcaggaaatggtagcggttcgcggcaaaaaagctcgctgtgccaggccggttgccaggcggcaatcgccaccgccgcctgtttactttccggctggccggaatacgggtccgtgacggcggccagcaggttattcacccgcccctgacgggcaaactggttgttccagtgcatcggaacaaacagcgagccggggcgctgcccttcgctgatcgccactttcgccaccatcaccccatgccgcgaccagatccgcgccagcccgtcagcgggaagctgatagcgaacggcatcctgcggcgccacctccaccattggctccgcgatatgctgcatcagccgcggcactgcgccggtacgggtcatggtgtgccactgatcgcggatccgcccgctgttgaggatcagcggataaaaggcatcggttgtcgcccgggtcggttgaggcgtcaccggcaccatccgcagcctgccatcgccatgccagccgcgcgtgatatcccaggcgacctcgctgcggctgaccggccagcgcaccggcggcatggtgtcccacgcctcacggctgagatccgccagcgcgccgatatcaaacgcccgctggccgtcgttttcgaaaccggacagcgccgcatgctcgcggaagacgtcatgcggatgctgccaggcaaacgcctcgcgataccccagagcctggcccactctggcgatgatccaccagtccgctttcgcctcccccggcggcggcagaaagctgcgctgacgggagatccgccgctccgagttggtgaccgtgccattcttctcgccccaggccagcgctggaaagcggatgtgggcgaaacgtccggtatcggtctgggcggcgacatccgagacgatcaccagcggacaggcggccagcgcctggctcaccgcgtggctgtcagggagcgacaccaccgggttggtacccatgatccagaccgctttgacctcgccgcggccaatggcggcaaacagctccacggcggtcagcccgggggtctgcgccagccgttccgtcccccagaagcgggccagccgctgcagatcgtctggcacaaaatccatgtgtgccgccagcatcgtcgccagcccgccgacttcgcggccgcccatggcgttgggttgaccggtcagcgaaaaggggccgcatccgcggcggccatacttcccgctggccagatggacgttgatgatggcgttacatttgtcgctgccgctggcggattgattgattcccatggtgtagagggtgatcgcccgcggggcggcgatgaactcgcgatagaatcccgccacctcatcggcaggcagaccgcaaaaggccgccaccctcgccacgtcccagccgcgggcggcggccagcgcctgcgggccgtcgcgaaagccatcgacgcaggctcctgcctcagccagggcgttaagcagccccgcaaacaacccgccgtcgcttcctggggccagcgccagatggcggtcggcgatctcgcaggtagcggtgcgtcgggggtcgatcgccacgatccgcaatcggggattatcccgcttcgcctgcgccagccgctggaacagcaccggatgcgcccaggcggcgttcgagccgaccagcaccaccagatcgctgttttccacatcatcgtagctgcagggcaccacgtcggcgccaaaggcccgcttgtagccagtgaccgctgacgacatgcacagccgtgaattggtatcgatgttcgccgcgccgataaaccctttcatcagcttattggcggcatagtaatcctcggttaacagctggccggaggcgtaaaaggccaccgcttgcggtccgtgctggtcgatgatctgtctcaggcgcgcagcggtttccgccagcgcctgaggccaggctacctgctggccgtcgacctccggcgtcagcagccgccccgccaggcccgtggtctcccctaaggcggcccctttgacgcacagacggccgaggttcgccgggtgctgatcgtcgccgcgcacgctcacctgccccgcgtcgtccacgctcgccagcaccccgcagcctacgccgcagtaggggcaggttgttcggatggtcttcatcaggaggcctccgcgcgggccagcagctgctggttgcccacccacactttgccgttttccactttcaccggccaggcgcgtaccgcctgttcactgccgtcgcacggccagccgtcgcgcaggcgtatccgctgtttgtacagcggggagatcaccaccggctcgccgccgacgtcccctaacagcccacgcgacagcacgttggccgtgctgcccggctcgcggttgtcgagggcgtagacccgctcgccgaagcggaacagggcaatctgccgctcccctaagcgggcgccgatccccgcctgcgccggaatggcgtcaaggtcgcataccgcctgccacggtcgggatgggagttcgccttcgggcaacgtctcagtcagcagcggctgcggctgaccgcgcagatcgcggcgctgcacagcctcgtcgggctggtcgctattaacgaaggagcggaacagcgccagacgctgcggatcgttgagggtggtctgccactcgcactggtagctgtcgacgatccgggccatctcctgctccagctcctcgccaatgccaagactatcctccagcaccacctgccgcagataggcgacgccgccctccaggttatccatccaggtgctggttcgctgcaggcgatcggcggtacggatatagaacatcagcagacgatcgatgctgcggatcagcgtcgcttcgtcgagatcgctggcaaacaggtcggcgtgacgcggtttcatcccgccgttgccgcagacgtacagattccagcctttgtcggtggcaatcaccccgatatctttcccctgggcttcagcgcattcgcgggtgcagccggagaccgccatcttgattttgtgcggggcgcgtagccctttatagcgatgctcgagccgtaccgcgagcccggtggagtcttgcacgccgtagcgacaccaggttgagccgacgcaggatttcaccgtgcgcagcgacttgccgtaggcgtggccggtttcaaacccggcgtcggccagctcgcgccagatagccggcagctgttccagccgcgcgccaaacaggtcgatgcgctggccgccggtcactttgctgtagagctggtaacgtttggcgatctgcccgatggcgatcagtccgtccggcgtcacttcccctgccgccatccgcggcaccaccgaatagctcccgtccttctggatattggcgaaatagcggtcgttggtatcctgcagcggcaggtgcgccggcttcagcaggtactcgttccagcaggaggccagcaccgaggccaccagcggtttgcagacatcgcagccgtgcccctggccgtagcggctaatcaactgctcgaaggtatggatatggttaacccgcaccaggtggtagatctcctggcgcgaccacgggaaatgttcgcagacgtcttttttcacttcgacgccctgctccgccagctgatactccatcacctgtttcaccagcgcgctgcagccgccgcagccggtagccgctctggtgcagctttttatcgccgacatatcccccgccccattgttcaccgcctggcagatatcgcctttgctgacgttatggcaggagcagatcggcgcgctgtccggcagcgccgcgacgccgagcgccttcggcgcggctccctccagcgcgggcaggatcagactctccggacgcggcggcagcgccatgcggttcagcatcatctgcagcagcgtggcatagtcgctggcatcccccaccagcacgccgccaagcagggctttgccgtcctgactgacgacgatttttttgtaaatctgctgcggaccgtcggtccattgatagctctgacagcccggcgtgcgcccctgcgcatcgccaaacgaggccacgtcgactcccagcagcttcagtttggtgctcatgtcggcgccgctaaagcaggcgtcctctcctgcgagagtggccgcggcgatgcgcgccatctgatagcccggcgccaccagaccgtaaattttattgtcccacagggcgcattcgcctatcgccagcacgtccgggtcagaggtacggcactggccgtcgatgtgaattcccccgcgttcgcccacctgcagcgcgcagccgcgggccagcgcgtcctgcgggcggatccccgccgagaagaccaccatgtcggtccgcaacgcgccgccgtcggcaaagttcagccgcaggccgtcggcctcgcgcacgatggcggtggtcgctttgctggtatgcacccccacgccgagggcgacgatcttctcccggagcatcgccgccccgccgttatccagctggacggccatcaggttcggggcaaactccaccacctgcgtctccagccccagctgtttcagggcgttggccgcctccagcccgagcagcccgccgccgataaccaccccgctcttcgccgcggcggcatgggcggcgatacggtcgagatcgtcaagagtgcggtagacaaagcaccccgcgagatcgttaccggggattggcggcacaaagggatacgagccggtcgccagcaccagtttatcccagtggatttcatgcccctcggcgtcccgcaccagccgtgcgtcgcggtcgatgctcgccaccgcctcgccgaggcggagttcaataccgtgttcaataaagaaatccccggccgccagcgacagcgactcggcgctgcgtccggcaaaatactcggagagatgtacccggtcgtaggcgggataacgctcttcgccaaacaccacgattcgatattgctgatgcagattgcggctcacgcattgttcgagaaaatggtggccgaccatgccatgtcccaccagcactaatacaggtttcgtcatcgtcattattcctgcagcctgcggctgcgttgaagaggggtcaaaaagccagtccacggtggcaggctcatcgctttccaggcgcgcggtaagcgcggcggcggcggtgcagtcgcccatcagcagcacgccgcgcaggcggccatcgcgcagcagcaggcggcgatagtggcggtcgatggggtcccagctggtataaatgtcatcctgttcgccggcctgctgctcgccagcgctaaagagttcaatgccggtgaccttcaggcgggtcccggcgtcctgccagacaaagccctcgccgggggcgccgcacaggcgatccgccagcacctcggcctgacgcaggcagggagccaccagcccccaggtctggccgtcaatttcgcaacattcgccgatggcgctgatccccggcagcgaggaggccatctgacggtcgaccacgatcccccgctggcacagcacgccggactgcgccgccagacggctgtcgggctgcacgccggtagccagcaccactctggcggcgcggaatacgcgcccgtccgccagccgcacgccatcggcgtcgatggcggcgatgcggcacgccagcacgcagcgaatgccgcgcacttcaagctgctgcctgagctcatcggcggcaaaagcgtcggtcagcggcgccattaatccgctgccgcgatgcagaagagtgacctctccgccgtgacgacgcagcgccgccgccgcttccacccccagcacgccaccgccaatcaccaccgccgggccgggtatcgccagaatacgttccacgtccgccagggtgcggaagggcataacctgcggacgatcaatgcccggcagcggcgggataaagggccgcgaaccggtggcgaacaccagctcatcccacggcagccaggtttccgcgatgcgcagccgccgttgctgaatatcgacttcatcgaccgcctcgccagaccgcaggcacaccccgtgccgggtgtaccactccgccggcagcaacgggatctgcgccgccgttttttcacctgccagcagcggcgagagctgaatgcggttataggccgggtgcggctcgtcgccgacgacggtaatggcaaaccgcgcggggtcgcgctcaaccagccgctgcaccagccgggtggccgccatgccgttaccgatcaccaccagtcgccgcgtcatgaccgcctccttacgccgctttcggctgtttttcatacaggaaatggaggatctgctggcgcagatggtgataccggctgtcgtccgccagctgaacgcggtggcgcggacgcggcagatcgaccgcgaggatctcgccgaccgtcgccgccggaccgttggtcatcatcagcacccgatccgagagcagcaccgcttcatcaacgtcgtgggtgatcatgacgatggtggtattgagctcctgctggatatgcatcaccgtgtcctggaggtgggcgcgggtcagcgcatccagggcgccgaagggctcatcaagcagcaacactttcggcttcatcgccagcgcccgggcgatacccacccgctgcttcatgccgccggagatctccccgggacgtttgtgcagcgcatgacccatctgtacgcgcgccaggttgtgttcgatccactcccggcgctcactcttgctcatggtgcgacggaacacctgatccaccgccagcgccacattgtcgaaacagctcagccacggcagcagcgagtggttctggaaaaccaccgcccgctccggcccgggaccggcgatttcccggttatcacacagtagtccgccctcggtaggggtggtgatcccggcgatcaggtttagcagggtcgattttccgcaacccgagtggccgatcaggctaatggtctccccttcgacgatatcgaaggagacattctgcagcgccaggaactcgccgctggcggtgttgaagcgttggctgacggcctgcacctgaattaatggtttcatgttggctccttatttttcctgccagctaaagcggcgagcgagcagcatcaggccctgctccagcagcaggccgacgacgccgataatgacgatggcgatgatgatgttttccacattgaggttgttccactcgttccagatccagaagccgatccccagcccgccggtaagcatttccgccgccacgatcaccagccaggcgatgccgatggagaggcgcacgccggtaagcaccgccggcagcaccgccggaaagaggattttgcgcatcaccgtccactccgagagctggaggacgcgggcgacgttgagatagtcctgcgggatccgccgcacaccctccgcggtgttgatcaccatcggccagatggagcagataaaaatggtccagctggaagccggctccgccttctggaacagcagcaggccaattggcagccaggccagcgggctgaccgggcgcagcagagcaattagcggattaaacatgcgggcgaagaacagcgaacggccgatcaaaaaccccagcggaatgcccgccagcgccgccaggccgaagcccaccgccacgcgctgcagggaggccagcacgttccagccgatgcccatgtcattgggcccgtcctgatagaacggatcggcaaacagggtcagcgccgagtccagcgtgctcagcggcgtgggaaagcctttgctatgcatcgccgccagctgccaggccagcagcagcacacccagccccaacagcgggggcagcaggcgctgggtgagctcacgcagccagcgcgtgacggtcggcgtggtgcgccggacctgcaccggcggcaggataatcacttcgccaggcgcgttgtccacgctgacgaccggttgcttacgttgtgcctgcttcatctcatgcccccttacgttgaatagagaaatggcgggcgtagccttccgggtcggacccgttccagaccgtcccgtccattagtgtgctgctgcgcatcctggctgccggcgcgctgatccctcctaccgcctgggcggcagcctgccagacatcgatgcggttaatgcgcgacgccaccgcgaggtaatccggagcctgcttcagcaacccccagcggcggaactgggtgaggaaccacatcccgtccgacagccacgggaaactcacctcgcccccggcccagaagcgcatcggatgggcatcctgccagcggcggccaaggccgttgtcatactctccaagcatccggccggtgaggtattgctccttggtattgagccagccgcgtctggcgagcaggcgggccgtctcccgggtgttctccggcgaggcggcgatccagcgctgcgcctccatcagggccgccaccagcgcgcgggcggtgttcgggttgcgttccacccagtcgcgacgggtgcccagcaccttttccggatgctcgggccagatatcctgggaagtggccgcggtgaagccgatacggtcgttaatagcgcgggcgttccacggctcgccgacgcaaaagccgctcatattgccgatgcgcatgttcatcaccatctgcggcggcggcaccacgacggtgcgcacatcgttgaagggatcgatgccgacgctcgccagccagtagtaaagccacatggcatgggtgccggtaggaaaggtatgggcgaaggtgtaactgcccggcgcgctgcggtcgatcagccgcttcagcccgccgaggtcggtcacccctttctcctgcagctcgctggagagggtaatcgcctggccattgcggttgagggtcatcagattggccatcgcctgcggcttgctggcgatccccagttcgaggccgtacagcaggccatagagaatatgcgccgcgtccagctcgccggccaccagcttgtcgcgcaccgccgcccagctggcttccttactcgccaccagggtgatgccatatttttggtcaaaccccttcgccgcggcgatggccagcggcgcgcaatcggtcagcggaataaatccgacccgcacgcgggtttgctccggtttgtccgagccgccggcccaggcggcctgcatcacgcccggcagcagcatcgcgccgcccagcgcggcccctgcctgcagcaagcgccgccgggaaattgaaaatttgtcgcccatatccgctccaccatgcgcaaaaaaaaagcgcccgacagtgcatacgcactgcaggacgcctttatccacggacacccgaaccgccattggttcgttgcccggacttttattcacttaatcagtaatgcaaacgggatgccagctttggcaatagcgcgctggcgggctttttcccaacgctggccggtttttcacctaaaagtgcaccgccggcaggcaaagaatgcccatcgattgtgcatctactcctttggtgttagcggccaaatcgccttcaccatcagcagcgcgcgggctatctcaaccatgcgctgatttttgtccatggccatcttgcgcagcgtctgccaggcctgctcctcctgcattccctggtgcgtcatcagcagacttttcgctttttcgatcagcttgcgctcttcgagcgcgtctttcagcgaggccagctggctggagagctgctgcaactcataggcctgctggcgcaccagcggcagtagctgtttatcgagccgtggcgtcacgcaatcgtcttcctctccggcctgccagccaggcgcgtcgtctgctaacagcgcgtcggtggcatccagcagatcgtcgatcagttgctcttccacttcgcgcaattgctcaagccgttgggtttgcaggccaaaccagcgcagcgccgtttccccgccgtcggcagccggctggcgggtacaggcgatccgccgcagctgttcaatatccagaccggcgtggcactgggttctgaacaactggacggtcgccgggctgcccagcgcctgaaagctgtcgaagcagggctgctgaccgtcaatacggtccaccagctgctggcgcaggctgtcgctgaactcgccgcgggtaaagcccaatgctcccagcgcgcgctcctggcccaccagctcttttccctgcataaagctgtacagggcgaccatccgaccagccaccggcggatcgtcaatgctgtcattgagctgcggggcgatgttcagcagatggcggatgacgcggctgaactgctccgtcgcggcttcagcggcaatttgccggcggccgatctgcgcgcgtagcgccgggagctgcgccagctcgtcaaccgctctggcgatacgccagcacagcgcgctgccggctaccgcgcgcgcccgttcgaggctggcataaaacagggctagccgctcgtcaaccagcgcccctcccgcccgacactccgctgtatacagcaagccgcccgagcaaagatagatattcgacgccccgcgctcacactgcagcatatgcaccagcgcgctgagctggctggccagttcccccagttggctaagctgctgaagctgttgtttttgcaggcgacgcgccagctgcagccaggccgtcgcatcgtgcgcatgaccagtcgtattattcatacccctcctccgggttaacgctttatactgcctaaagcaataaccgtgcctttaagaaggagtttgtatgcaacgtattgtgatcatcgccaacggcgccgcctacggcagcgaatccctgttcaacagcctgcgcctggccattgccctgcgcgagcagcagtccgacctcgatctcaagctgtttctgatgtccgacgccgtcaccgccgggctgcgggggcagaagccggcagaagggtataatgtgcagcagatgctggagatcctcaccgcccagcaggttcccgtgaagctgtgtaaaacctgcgcggacggccgcggggtcagcgcactgccgctggttgacggcgtggaggttggcactctcgttgagctggcccagtggaccctggcggcagataaagtgctgaccttctgaatctggggcgccaaacggcaggaaatatcaggtttcgccgcctgcagaggtaaaaaaaacgttagctgaatgctttcaggaacaacgtcatttttgtttaatctttatccctttttttgatcaaaatcagcatcccgacccgcgccgtttggtgtgatgcacagagcaaagtgtgaacaatatcacgcgaggactgggtgggcaggatgctgtagcgggacagaaacggggtataaaatggcgatggttaaagcaagtttgacgttatttggtggtgacacgctggtggtgcggtgctcagagcgctgccatattcatctgatgagcgcgaaggtcccgggcgacagtcatgcggatattctgagcgtgcaggatcgggacagcgcctatctgacggtgccctacagcggcacctggaacgtgcttatcgacagtcacagccagtcgctggagcactccatcagctacgtgccggcctgaccgtcactgccagaacacacgcccggtcatgccgggcgtgagattcatgacaaacctcatgcaatcattgtacttgcagattgcaccagaaaaataacaaggaaaatcaatttattgattttcggctgataaccaccagtaaggaaaaaccacgctttttccttactggtcagcaatcggacgcccggtcatgccgggcgttttcttttgcgcgcgctcaggccaggcccggcgtcggactctcgcccaacagcgcgcggacgctggccaccaggtcatcgagactggcatcgtgcatgcccagcttgcgcagcgcctgctcaagcgaaaacagatactgggcgttggtgccgagcggcccgctggcccgggcgatcagcggggcgataacctgggcactggtatccggttcaaacagtggatggcgcggatccataataaacaccagggcattcaccgtccgtccgtcgtccagctccagcttgcaccaggtgggcagatagcagccggtgatcatctcccgcttccacagcagggtcagctcctcctccagcgtgtcgtcaggcagacgataggcgacgccggtggttcggccgccctctttgagagccagcatgcgtcccggctggcaggcactaccgcgcccggcggtcaaccgcaggcaaaacgcgcggtgccagcccggcagcgtgccggtgcaggactcgcgataattgagcgccgggttccagataagcgaaccgtagccaaagatccatactgagccatcatccgggcggcaggccagcgtcgccgccagcgaggctgcacgttgttctgccgaccagagtagcgattcctcaatagcgccaaacgctgtcttacaatccgcattcattaagaaatcacgagttaacactgtttactacctccgccactgcccgcttcccggcgttcgtctcatgcatccgtcaatattgctgaaatattatccagctttatctttcaataagcaatcagcggggcgctggcaagcgaaaaagcggcgtcagcgattattttttcttatgccacttatcatcatcgcctttctcatagctgttcttcaccgccgcccaggcgactttgtgcgccgtctcttcgcggctggcgtcatcgcgccgctcgtctttatctttatattgatcccaggcgctgttaaacgcttctttataaatttcctgcgcatgggcaggcagtacatgctgaacgctgtcggggagttcatgtttactgcgatagggcatactgacctcctgtttgagcattaagtttaagtctggtacgcagtcggctggctatcaaggttaaaatgagcagaaaaattattttagtaattatctgaataataagaactaaatataagtaaacataaattataataaactaatcaagatatccctcgatacccgtaaatttaagtaaaaaaccagcggtaatttagcaagatctgttactttaccgccctacgtttttataattataacacctgcataaatggagatggttcatgacccatgcacatgaggcggtaaaaacccgccataaggagtcttccctcgtctttccggtgctggcgctggcggtgctgtttttctggggcagcagccagtcactgccagtggttatcgcgatcaatatcctcgcactggtcggcattttgagcagcgccttcagcgtggtccgccacgccgacgtcctcgcccaccgcctgggcgaaccctatggctccctgattttaagcctgtcggtggttatccttgaggtcagtttgatctctgccttaatggccaccggcgacgccgcgccgaccttgatgcgggataccctctactccattattatgatcgtcaccggcggtctggtcggtttctctctgctgctgggcgggcgtaaattcgccacccaatatatgaatctgttcggcattaagcagtatcttatcgccctgtttccgctagcgattatcgtgctggtctttccgatggcgctgccgggcgcgaacttcagtaccgggcaatcgctgctggtggcggtaatttcggcggccatgtacggcgttttcctgcttattcagaccaaaacccatcagagcctgtttgtttatgagcatgaagacgacagcgacgatgacgacccgcaccacggtaaaccgtccgcccacagcagcgggtggcataccgcctggctgctggtgcacctggtggcagtgatcgcggttaccaaaatgaacgctaacccgctggaaacgctgttgaccagcatgaatgccccggtggcctttacaggcttcctggtggctctgctgatcctgtcgccggaaggccttggcgccctgaaagcggtgctcaacaatcaggttcagcgggcgatgaatctgtttttcggctccgtgctggccaccatatcgctgacggtcccggtggtcaccctcatcgccttcctgaccggcaatgagctgcgctttggccttggcgccccggagatggtggtgatggtcgcctcgctggtgctgtgccatatctccttctccaccggacgcaccaatgtgctgaacggcgcagcccacatggcgctgttcgccgcctatctgatgaccattttcgcctgaccccgctttcccacccggcggagtccgggcgaaaaaaagcctgccggttttgacgccggcaggcttttttactgatgcagtcaggcttacttgctggtatccagctcgtcgaagcttttcaccagatcgtcaatcgctttcatctgtttgaggaacggctccagtttatccagcggcagcgcggacgggccgtcgcatttcgcgtggtccggatccggatgcgcttcaataaacagaccggcgatacctaccgccataccggcgcgggccagctcgctcacctgcgcacgacgaccgccggaggctgcgccaaacgggtcgcggcactgcagcgcgtgggtgacgtcgaaaatgaccggcgagttgttggaggctttcttcatcacgccgaagccgagcatatccacgaccaggttgtcgtaaccgaagttcgcgccgcggtcgcagaggattactttgtcgttacccccttcgataaacttatcgacgatgttgcccatctgacccgggctgacaaactgcggcttcttgacgttgatcaccgccccggtcttcgccatcgcttccaccaggtcagtctggcgcgcgaggaaagccggaagctggatcacgtccaccacgtcagctaccggctgcgcctggctggcttcatgaacgtcggtgatgattttcacgccaaaggtctgcttcagctcctggaaaatcttcatcccttcttccagacccggcccacgataggagtggatggaggaacggttggctttatcaaaggaggctttgaagacgtagggaataccaagcttctgcgtaacggtgacataatgttcgcagatacgcatcgccaggtcgcgcgactccagcacgttcatcccgccgaacagcacgaacggcaggtcgttcgctacgttgatatcaccaatgctaaccactttttgtttcataagttcgccttatcagggtgtaaccggaatggttccagactaatgcaatgtaatttgtttatgcgaaatcgtgttgatctgcgcgcggatcatctcgctgatcggatcctccgggcactgctcaacgaaatagctcagatccaacagcgccacgtgatcgcagtccagctgggcgtatatcagcccgcggtcgcggatctcatacggatcttccggattaaactgcagcagcgcttcgctggcgcgcagggccagctccatctgccgctcttccatcagcgccgacttcagggtgtccagcagcttgcggatcacctcggcgttatccgcttcgtcgagatcttcattaaacagttccgccaccggcccgatgttgcccttcagccatacctccagggtatgctcgtcgagggtctcgccgttaaacggattaatcagccacatctcttcgctggtttccgggtccgcacgcagcagcatctgggttgggaagatcaccggcaccaccggcagcgccaggcgctgggcgatccacagcaggatcgcgcctaacgacaccgcgctcccctggcggttaaccagcactttatccagccatagcgcgtcggaaagacgatacacgccctgcgaggcgccaaagccccactcgtcataaaacagctccagcaatcgttctatttggcgctcctggtcccacgacggcgcaatctcctcctgcgcgaggcgcagcaatcgctgcagctcttcctcgacaaaacgcgacggaaaatcgtcgcggacctgttcagaaatgaggaccatgccatcacacaatggcgctttgttaaattcgaaatccgctaatgaccccatgacctaccccagtatcggtattcttgtgatggcgagttgaatgatgataaacaacaccaccagcgccagcaggaacgcgataaagcggctctgctggctgcgcggacgacgacggcccaacgcgataaaacctaatgcgatgtaaatgataacgccaaacagcttttcagtcagccatgcgccgtcttctgtgaacggcaggtagtgcgttatcgccattaaccctgcgccgctgagaaacagcagcgtatcgctgcagtgcggcgcaattcgcacccaccgctggttcagcagcgggctctggtgatacatccaccagtaacgtaaaacgaacaatcctaccgacaccgccactgtggcaatgtgcaggtagaggacagccgtgaataagttcatcagccaacattctccatgtcgggtaaacgtccgagggtcagacgctcattgtcgccatagtcgcgacaggtcgcgacgtccagatagcccgcttcgcggaacagcgcgcgaaccgcctcgccctgagtccagccatgctccagcagcatccaaccgccgggctgcagatactgccgtccctcgcggatgatatgcgccagatcggccagcccctggtcgcctgcgaccagcgccgtcaacggctcaaagcgcacatcgccttcggcgagatgcgggtcggcggcgtcgatataggggggattgctgacgatcgtggcgaagcgctgcccgtccagcgcgctaaaccagtcgctttgacttatcgtcacgttagcgatgcccagatgttcggcattgcgcaacgccagcgccacggcgtccggcatcacgtccaccgcggtgacctcacagtccggacgttcgctggccagcgccagggcaatggcgccggtcccggtgccgaggtcgagaatacggcacggcgcggttggcagacgcgccagcgcctgctctaccagacattcggtatccgggcgggggatcagcgtcgccggggagacgaacagcggcagcgaccaaaactcgcgctgcccgaccagatgagcaataggttccccgcgctggcgtcgcaccaggagcgcctccagcctcgccgcctcgtcagcagagagcgtcgtttcaccgaaggccaaaatccaggttcgcgcccggccggtaacgtgtcccagcaagatctcggcgtcgcgtctcgggctgtcgctctccgccaggcgggcgatcgcctgctgctgccaggcctgaaaggtcatcattcctgctcggacagcgccgccagctgatcggcctgatgttcctggacaatcggctcaatcagcatgtcgagtttgccctccatcgcctcatccagacggtagagcgtcaggttgatgcggtggtcggtcacgcggccctgcgggaagttataggtgcgattgcggtcgctgcggtcgccgctgcccagcaggttgcggcgcgtggaggcttccgcctgctgacgtttggccacttcggcggcgcggatgcgcgcgcccagcaccgacagcgccttggctttgtttttatgctgagaacgctcgtcctggcactccaccacgatgccggtgggcaggtgggtaatgcggatagccgagtcggtggtgttaacgtgctgaccgcctgccccggaggaacggaaggtatcgatgcgcagatctgccgggttaatgtccggcatttcggcttccggcagctccggcatcaccgccaccgtacaggcggaggtgtggatccgcccctgcgattcggtggccggcacacgctgcacgcgatggccgccggattcaaatttcagccgaccgtaaacgccgtcgccgctgatcttggcgatcacctctttaaagccgccgtgctcaccttcgttggcgctgaggatctctacctgccagcggcgcgattctgcgtaacgggtgtacatgcggaacagatcgccggcaaacagcgccgcttcgtcgccgccggtcccggcgcgcacttccacgaaggcgttacgctcgtcatcaggatctttcggcaggaggagaacctgcagctgttgctccagctggtcgcctttttctttggcgtcacgcagctcttcctgcgccatttcgcgcatttccggatcgtcgagcatcatctgcgcggtttcaatatcctcctgcacctgacgccagtcggtatagcagcgcgccacatcgctcagttgagcatactcccgcgacagcgcgcggaatttatcctgatcggcaatcgtcgcggcatcgccgagcagcgcctgcacttcttcatggcgctcgtacaacgcttccagtttggcaacaatagaagacttcataggcgtgaattcaccctgtcctgaaaataagagaaaggtgcgctattccagcccgaggctgttgcgcagaatatgcagacgttcgtcgtccccgtcacgggcggcctgctgaagagatttggttggcgcgtggatcaggcggttagtgagcttgcgcgccagatcctgcataatttcctgagcatcaccgccctgctccagcgcggccagcgctttcgccgtcagctcctcacggacctgctcagactgagaacggtattcgcgaatggtctcgctggcgctctgcgcacgcagccaggccataaattcgctggtttcctgctcgacgatcgattccgcctgcaccgcggcagccttacgctgcgccaggttatgctgaataatgttttgcaaatcgtcgacgctgtagaggtaggcgttagccagtttgccgacctctggttcaacgtcgcgcgggacggcgatatccaccagcagcatcggctggttacggcgcgccttaagcgcacgctccaccatgcctttgccgatgatcggcagcgggctggcggtggagctgataatgatgtcggcctctttcagccgttcgtcgatatcgctgagggctgtcacctcggcgcccacttcctccgccagcgcctgggcgcgttcacgggtgcggttggcgatcaccattttgcgcacgtgatgttcgcgaagatggcgcgctaccagctcaatggtttcaccggcgccgaccagtaacacggtgacgctggagagcgattcaaagatttgccgcgccagggtacaggcggcgaaagccacagagaccgcgctggcgccgatatcggtttcggtacgcacgcgcttagccactgaaaaggatttctggaacatccgctccagctcgctgacgttaagatggccgcggctggagtcggcgaaggcttttttcacctggccgaggatctgcggctcgcccagcaccagcgaatcgaggccgctggcgacgcgcatcagatggctgacggcgtcattatcctgatgccagtaaaggctttttcgcaggtcttcttcgttgaggccgtggtagttgcacagccagcggatcagcgcttcctgcaggttatcctgctcttcgacgctgagatagagttccgtgcggttgcaggtcgacagcaccaccccaccctgcaccatcggctgagccagcaagctctccagcgccttatcgagcgtttccggcgaaaacgtgacgcgttctcgcagggcgaccggagctgttttgtgattgatgccaagagctaaaagggtcattgtgagggagtagtaccagcgttgctaaggttagtctgagtgcatcatacaggatgcgcgtaatcaataaaagagaggctccccttttggagtaatagttaaagcaagaccgccattaaggttaattttttgatttcagacaacttgaacgtagacgctatcgcccggcgacgctagcattaagggttataaatgtaacctgctacacaaatcggcccgctgttccctgtcgccgtttttccctgtagacatcaaggatttgtcatcattatgaatcgactgttccgcctgctgccgctggccagcctcgtcctcaccgcctgttctcttcatacgccgcaagggcctggcaaaagcccggattcgccgcagtggcgtcagcaccagcaggctgtccgcagcctcaatcagttccagacccgcggggcgtttgcctatctttccgatgagcaaaaagtctatgcccgcttcttctggcagcaaaccggccaggaccgctatcgcctgctgctgaccaacccgctgggcagcaccgagctgtcgctgaccgcgcagccgggcagcgtgcagctgatcgataacaaaggccagacctataccgccactgatgccgaagagatgattggccgtctgaccgggatgccgatcccgttgaacagcctgcgccagtggatcatcggcctgccgggcgacgccaccgactattcgctggacgatcggtaccgtctgcgtgaactgaactatacgcaaaacggcaaaacctggcacgtgacctacggcggctacaccagcgatacccagccagccctgccgtccaatgtcgagctgaacaatggcgctcagcgcatcaagctgaagatggataactggatcgtgaaatgatgacccgctggccctctcctgcaaaactgaatctgtttttatatatcaccggccagcgggccgatggttaccataccctgcaaacgctgtttcagtttctcgattacggcgatacgttgaccatcgaaccgcgtactgacggccaactgcgcctgctgacgccggtggccggcgtgccggacgaggagaatctgatcgttcgcgccgcgcgtctgctgatgcatgccgccagcgaaagcgatcgcctgccggcgggcagcggcgccgatatcagtatcgataagcgcctgccgatgggcggcggcctgggcggtggctcctccaatgctgccaccgtgctggtggcgctcaaccatctgtggggctgcggtctctcggaagatgagctggcgactcttggccttcagctgggggccgatgtgccggttttcgtgcgcggccatgccgccttcgccgagggggtgggtgaaatactgacgctggtagaacccgaggaaaaatggtacctggtggcccacccgggggtcagtattccgacgccgatcatttttcgcgatccggagctaccacgaaataccccgcgccggtcaattaatacgttattaaattgtgaattcagcaacgattgcgagcttatcgcaagaaaacgttttcgcgaggttgatgccgcgctttcctggctgttagaatatgcgccgtcacgcctgaccggcacaggggcctgtgtgtttgctgaatttaacaccgaatccgctgcccgtcaggtgctggacactgccccggcatggctaaatggctttgtggcgcgcggagttaacctttcgccgctcaagcaggccctgctctgaatcctgcgccgtgatggcacattgataatgagtcagccggggaaattgagttacggtgacaacgtcaccctgttccagacgttgcatcgtgctctttaaatacaccgactggatcgaatggcgccatcccgcacattattggcccattcatccaccactggacgcatgcctgaggttcttctcgtgcctgatatgaagctttttgctggtaacgccaccccggaactagcacaacgtattgccaaccgcctgtacacttctcttggcgacgccgctgtaggtcgttttagcgacggcgaagtcagcgtacaaatcaatgaaaacgtacgcggtggtgatattttcatcatccagtccacttgtgctcccaccaatgacaacctgatggaactggttgttatggttgatgctctgcgtcgtgcttcggcaggtcgtatcaccgccgttatcccttacttcggttatgctcgtcaggaccgtcgtgttcgttctgctcgtgtgccaatcaccgcgaaagtggtggcggattttctgtccagcgtcggcgttgaccgcgtgctgaccgttgacctgcacgcagaacagatccagggcttcttcgatgtgccagtcgataacgtgttcggcagcccaatcctgctggaagatatgctgcagctgaacctggacaacccgattgtggtttctccggacatcggcggcgtcgtgcgtgcccgcgctatcgctaaactgctgaatgataccgatatggctatcatcgacaagcgccgtcctcgcgccaacgtctcccaggtgatgcacatcatcggcgacgttgccggtcgtgactgcgtgatggtcgacgatatgatcgacaccggcggcaccctgtgtaaagcggcagaagcgctgaaagagcgtggcgcgaaacgcgtattcgcttacgcgacgcacccaatcttctccggcaacgctatccagaacatcaaaaactctgtcattgatgaatttgtcgtctgcgataccattccgctggcaccagaaattaaagcgctggataaagtgcgtactctgacgctctccggtatgctggctgaagctattcgccgtatcagcaatgaagaatctatctctgctatgttcgaacattaatcgagcccagcacaaaaacccgctgcggcgggtttttttgtctccgcaccttatttgtatgatcaatgcctccttcacctgccatttagttgacagatgatgcgctcatggatgaaacattattgtgaacagattattttcctcacatgtgatgcctttccgcgccctcatcgacgcttgttggaaagaaaagtacaccaccacccgcttcacgcgtgacctgatcgccgggatcaccgtcgggatcattgcgattccgctggcgatggcgctggcgattggcagcggcgtgccgccgcagtacggcctctatacctcagcggtggcagggattgtgatcgccttgaccggcgggtcacgctttagcgtttccgggccgaccgccgcctttgtggtgatcctctatccggtctcccagcagtttggtctggcgggactgctggtggcaaccctgatgtcggggatctttttaatcctctttggcctggcgcgctttggccgcctgatcgaatacatcccgctgtcagtcaccctcggcttcacctcggggatcggtatcaccatcggcaccatgcagattaaagatttcctcggcctgcagatgccccatgtgccggagcattatctgcagaaagtggcggcgctggcgatggccctaccgaccattaacgttggcgatgccgccatcggcgtcgttactcttggcattctgatcctctggccgcggctgggtatccgcctgccgggccacctcccggcgctgctggccggctgcgcggtcatgctggtggtcaacttgctcggcggcgatgtcgcgacgatcggctcgcagttccattatcagctggcggacggcactcagggcaatggcattccgcagctgctgccgcagctggtattgccctgggatatgccgggctcaaactttaccctgagctgggcctcgctgcaggctctgctgcctgccgcgttctcaatggcgatgctcggcgccattgaatctctgctgtgcgcggtggtgcttgatggcatgaccggcaccaagcacaaagccaatagcgagctgattggccaggggctgggcaacattgtcgcgccgttcttcggcgggatcactgccaccgcggcgattgcccgctcggcggcgaacgtccgcgccggcgccacatcgccggttgccgccgtgatccacgccctgctggtgatcctggcgctgctgatcctcgccccactgctctcctggctgccgctgtcggcgatggccgccctgctgctgatggtggcatggaatatgagcgaggcgcataaagtcatcaatctgctgcgccacgcgccgaaggacgacatcgtggtgatgctgatgtgcatgtcgctaacggtgctgtttgacatggtgatcgctatcagcgtcgggatcgtgctggcttcgctgttgtttatgcgccgtatcgcacgcatgactcatctggcgccggtcaacgtcgaagtgccagacgatgtgctggtgctgcgggtaattgggccgctgttctttgccgccgccgaaggcttgttcaacgatctggagacccggatcgccggcaagcgcatcgtggtgctgaaatgggacgcggtgccggttctcgacgccggtggcctggatgccttccagcgctttgtgaacaagctgccggaaggctgtgaattgcgcgtatctaacctcgagtttcagccgctacgcacgctagcgcgcgccggcgtcaagccgctgcccggacgcctgagcttctaccccgatcgtcaggccgcgctggctgacctgtgatcacccggcggcaggtccctgcgcctgccgcatcaaggatccggtcgcctgctgcagccagctcagcaccgccggcgtcatccaggtgcccttcatcaaatgcggctcctgctccattgcccgacgaaacttctgcaacgtctgcggccgggtaccggcgtaggactgaaacagttcaagccacgcccgggccagcgcctgacccgacgccgagtccggcgctacgccctcccggcacgcctgatgcagcttcgccaccagcgcaggccactcctgtagccggtcaaaatagtgctggcgggtgaacgccatctcttcttcgtcaaggtaccgcgcccagatggccagtttgctttcggcaaaggcctcggtgatataggcgatgattgccggcgtgacgccggtctgttcaaccatctgcggctcggcggcatgcatctcgttcaggcgggtcagaaactccggacgcccggccgtatcctgctccaggcgctccatccagcgcgtcgccagacgcatcgcctgcggactgtccgtcgggcagccgctcgccatcagcgtctgcacctcctccgttagctcgcgccacgcctgcgcccgctgttcatcctgtgccgcaaacggcagcgcggctaactcctgttgactaaaccaacgatcgtacattttcattaactccagcgtctgtagccaggactccagatcgggttcattgccgctcgccagcgcctcgcgcagcaccaatagtcggtcgcgcagcctgccaacatcgcgtagctgggcgttgagcgtatctatctgctgcgtcagcagctcgggcagcgacagcgtttgccgatcgagatagtccttgattgtggcgagcgttagcccggcctgcgccagcgcctttatcatatgcaggcgctgaaccgcggacaggttatagagccgatagcccgcctcgcttctggccgaaggcgttaacagccccgtctgttcataatgatgcagcgtacgtaccgtcagtccggcacgcttcgccagctctcccacctgaattaacatgactgctcctctctgtggccaggtccgctactctgcagcctgacgtaacgtcagggtcaagcaaaaaccgcgcttgctattcatttttgctggcaaccatagcagcacgaaggccaggacggaatgggggcgtaatatggcgggaaaaagaggaagagataaagtgagacacagaaaagcgcatcggccttcagcggccgatgcgggaaatcatgctacggttagctgtgacgatgctggttacgacggcagcgtttatcgtagtggcgcacccaccagtagcggtcgctgacctgctcgtggccgccaatacgggcaccggccagccagagcactgcgccaacgaagatgcttaggattgcgccatgcgcaaagaattgtggcaggttaagctgcggaagctggttcagaatggagtaacctacccccacaaccatcaccaccaaccctaaccccatgagtacgttaccgagtaacgaagcgtttttgcgtttcatgtgtcacctccggactttgggttgccagggaatgtccccaaatcttataggtgtagtatagacaaggtctcttctgcggagtgcgtccacgatcacattagtgaacagcgaatagacaaaaatttacaaataagtctatgaaccatatcaaattctaatgatttagtgagtaaatcatcaatgcgggtattgtctaatagccagaattttgtcaagcgcgcccgcagacagtacactacgcggcagagaatgccccatgcaggatagaaaacgtgaccattaaactaattgtcggcctggccaaccccggtgcggaatatgccgctacccggcacaacgctggcgcctggtatgtggatttactggcggatcgccatcgtgcgccgctgcgcgaagagagcaaattcttcggctacacctcgcgcatcaacctggcgggcgaggacgtccgcctgctggtccccactacctttatgaacctcagcggtaaagccgtggccgcgatggcgaccttttatcgcatcaacccggatgaaattctggtcgcccatgacgagctggatttaccgccgggcgtggcgaaatttaagcttggcggtggccatggcggccacaatggcctgaaggatatcatcagtaagctcggcaataacccgaactttcaccgtttacgcgtcggaatcggccatccgggcgacaaaaacaaggttgtcggctttgtgcttggcaaaccaccggccagcgagcagaaactgatcgatgacgctgtcgacgaagcggcgcgctgtaccgaaatctggttaaaggacgggctgaccaaagcgaccaaccgtttgcacgcctttaaggcgcaataagccgttggcgtgcggcatttttgccgcgcaccgtgtataataggcaaagctattcaattttctgcaatctgttccttgtaacagattgattatccaaagattaaggtgatttaaatcatgggattcaaatgcggtatcgtcggtttgcccaacgtcggcaaatccaccctgttcaatgcgctcaccaaagcgggtattgaagcggccaacttccccttctgtaccattgagccgaacaccggtgtcgtaccgatgcccgatccgcgtctggacaagctggctgaaatcgtcaaaccgcagcgcatcctgccgaccaccatggagttcgtggatatcgcgggcctggtgaaaggcgcgtccaaaggtgaaggtcttggcaaccagtttctgaccaacatccgtgaaaccgaagccatcggccatgtggttcgctgctttgaaaacgataatattattcacgtcgcggggaaagtgaacccggcggaagatatcgacgttatcaataccgaactggcgctgtctgaccttgatacctgcgaacgcgcgattcaccgcgtctccaaaaaagccaaaggcggcgataaagacgcgaaggttgagctggccgcgctggaaaaatgcctgccgcagctggaaaacgccggtatgctgcgtgcgctggatctgaccaaagaagagaaagaggccatccgctatctgagcttcctgaccctgaagccgaccatgtacatcgcgaacgtcaatgaagacggtttcgagaacaacccgtacctcgatcaggttcgcgccatcgccgagcaggaagggtctgtggtggtgccggtgtgcgccgccgttgaagcggacatcgccgagctggacgatgaagagcgtgacgagttcatggctgagctgggcctcgaagagccgggcctgaaccgcgtgatccgcgccggttacgctctgctgaacctgcagacctacttcaccgcgggcgtgaaagaagttcgcgcatggaccatcccggtcggagcgaccgcgccgcaggcagccggtaagatccacaccgacttcgaaaaaggctttatccgcgcgcagaccatcgcttatgaagacttcattgcctacaaaggcgaacagggcgcgaaagaagccggtaaaatgcgtgctgaaggtaaagactacatcgtgaaagatggcgatgtgatgaatttcctgttcaacgtctaatcccgctgactggcgttttcgccgccaccgcgcaaaaaaaatccacgcagcggcgtggatttttttttacccaggcgacacgctactccacaatatgggtatcttctgccgcctcgtagccatcaacgatctgcacaattttctttaactcagcctcaataaaagccggggtggcgctttccccagaggccgggtgatgaagctccaccgagatgccgctggcggcattggtcagcgacaggctgatctcctgctggccccgcgaggacgaagaacgcccgatatgctgcatgatagccgccgccgccgcgcgcgtatcaacgtctgcgagatgcccccatctcatttcaacatgcccctgctgtcctgactttatcacctgcagcgtatagccgcttcttgccgttgccatgccttttcctccgatttagttgcccgggagtcgcattatcagcccggttttatcagccaggttcgcgcacctgcgccttgccgttaatgactcttttccacataggtctgcatgttttctttggtcactaactcaaacgggatccagacatgagactcgaccttttctcctttaatcagcttcagcgctaccgctaaggccgttttgccctgaccgacggcgtcctggaaaaccgtcacctgaatcttatcgctggccagggctttcagcccgtccggggtggcgtcgatcccgccgatcagcagcttcttctggcttttctccagcgccatcgccgcgccaatcgccatctcatcgttgttcgccgccacaatatcaatcgcttctccgttgcccgtccagttctgcatcagatccattccctcgctgcgggaatagttggccggctgtttctgcaccactttcattgccggatacttggccaccacctgctccacatctttggtgcgctgcagcgcgccggcgtcggtgagattgccgatcatgatggcgacgttgcctttgtagttcgccagcttcgccagcgcctccatctgcaatgtgccagactcccgctcgtccgaaccgacaaacaccacgccgggcggtaacgttttatcccccggcgtccggttcacatacaccagcggcattttggcctgctgcgccatcttcgtcagctgcggggtgctggcggagtccaccgggtcgacgatgatcgcgtccacgccggaggcgatgaagctctgcacctgatcggcctggcgtccggtgtcgccgcgggcgtcttcaaactgtacgtcgacgtggcgggcttgagcttctttctcaatggactggcggataatagtgagaaagttttgatcgaagtaggccattgagacgccgatcttctctgctaatgccgaagcggaactggccagaaggcctactaacaggatgattttacagtgcttcatagtatgcccccagagatcgaaataaaattttcaatacaactacaaacggtatatttaaatcattttcagactacgaagggcgttcggttcttgcaatattgatgtaaagaaaatgttgccatgcgcacactttatttcaccgcctcactcaccgagggctcaccggttgcggggagcgcagcggtcggcgacgccggctgttttcgcttcagcagggcatactccactatcagctgttgcagatgcagctccgcgaggcttccccgcgcggctggccagggttgatcaacgggaagcgcggccagctggcgcagctgctcctccagcggaacagcgcggttaaacgactgtgtgatggcaaatactgcggttttcagttcgctcaccgtcaggtacttccccttctgctcgtcgagggcattgagctggtcggcgagccgctgcagctgctgcatgccctccgaccagccggtaaggttttccgcgggcaatgcgccagtactcagctgctgccgccactgctgcgccagcggttgcgcctgatccggccagcggatcagggcctggtggaccagctggtcgccgtagctgaccgcccagtccggcgccaggcgggcaagctcgccaagctggcgctgcgtctgtggcagatcaaccggccccgggggcgttgtcgccggcaggcccggtatcggtccggcattttgggtgaccgaaatgggcggcaagtcggactgacgcagcgccagccatccgccgacggcaatacccgttaccgccagcatggtaaccatcccggcgataaacggcttccagcgcggcgcggctgccggagtagacgccgccaccggcgcgggccgctttgcaggtgaaggcggagccagcggctcagcctttggtctacgttttaggtctggcactggctcaaccttcgccgcatcctcttcgctgaccagagtgccgggaagttccgcgtcagacaccgccaccggcggcgcggtgggaagcgctggcgcagggtcgaggctctcgaagcgagttgccgtgctgtgcagtagcgcccgcaggtcgctcagctggttttcaggagcgatctcaaggcgctggagcactgcgtcgaagctttgcagcgaacgttcagcctgctcaagcgactcaacatcctctggggtaagattcagggtacggatcacctgccgcagccgcttgctcagggtgcggaagatctctgtccgggccgggagcgcctgtggccacaggtttttcccctgacgaaccagcagcgactccatcagcgtcagcccctcattgatccctgccaccccgcccagccgggcgcgggccagggtataccaggcgacagtctgcaggtccgcgccgtgatgctccaacagcccgcgggcaagctgctcggcatacggccagttaatatccggccgcgccgggtggctgagcttgttcatttccgcacgcagggccataaaatcagccagcgtgcgcgggtcgccaccggctttatagtgacggtcgtggtgtgttgtcatcatgatgtctttcagcgagagattagagggcggagcgggcgtcaaggtactgctgacgtttgaggtggcggatcaacaccctgccctcgggcataaactccgtgccgtaacgcaccaggccaatatccttcagctccgcatcaatggcatagcgcagttcgccgggcgcatgctgatcgagcatcaccaccgcgatccgctgcaggcgcggttcgtatttcagcaacaccgccgacaacgtgctcatcagttgatgcgccgacgctggcatcccctggaggacagcggtcatatccggcaggccgtagtccggcagatgcgccagcgttccggcccgacagttgaggatgcgctgcatgttatcgagcaccgacaggatgacctgatccgtttcgctgacagtattcaggtcaagcccgccggcgaaattgccgtacaggatgtcatacagggagggacgaggcattttcacttctccttaaacgggtgcagcgtcagttgattttggctggcttcgataatgcgcggcctcgccggatcaagttcgtcccgggtgagtaccagtcgccagctgttttgcgtcaggtctggatcgataaacatggccgccaccgccacaaactgcgcgctggtttccatgggcatatcgacggtcaccgattcgcccggacgcaggcgaacatctttttccgccacccggtccgcctgcagcgcctggccatcgccggcaaacagcgacgggtagtcagtattgtcgaacgcttgccggtccttcagctgataaatacgcaccaccgtcgccagggaggcgcctttggcattgttattcacgccttcccgggcgcgaagatccagatgcagggttttcacctgggggtaaaaaatggactgggtcacggaaacggcgccgtctttcacggtctgcgtcagtccgcagccggttaagacggtaaccatgaggaatgccagcaacctggcggagggtttaactgcggtaatcgccatcttcatcgctctccctgcggtggatattttcccggacgcgctgatagcgccccagataaatcgtgactctgtcgtcagcctgtttctgcgcatccagaggacgcagcacagcggtacggccgagctggacggcatgctcctgctggcagcaaagttgcgcatccggcagtaaatggcgggcgacgcaaagctgcagccgcacgtcaagatgagatccgagccagacgtgcagaagcgccatcaggtcgctgaacagttcgccgccgggcagccagccgcgaacctcatcaggcttttccgtggccagctgcagcaacacctgaccgttcacatccgtggcgtgggttcccatcactggcctatgttgcaggctaaccggctgacggacgctcatcgttaacggctgcgacaaggggatccggcagggatcgtggtggtacaccgtcgcccgggtccccggggccaggagcgccaccagcgcctccatgccttccccggatctccccggcagcatcatcaccggcagcagcgccagaaatcgcgacagcggcgctgcggcaacggcggcacatcccggtatgcccagccccgccaggcccagcagatactgcgagatgttgtccgtgccgcccgcccgaaaggttgccgggtaggaatatttgcgccagatacggtaatactgggcgatcagccgatggttaaagatatcgaggaaatcctcggtggcctcgacgccttcccgccgttgcgcaatgtcatcgctatagtgggtcggcagcggggattccacgccgtagagtcccataaaagtcacgcgaaccgccggcggacggggcggttcaggatcgtccattccacggatttcgccagccggaaagcccatccccggatgcgggcgaaagcgtatgggttcatcacctactagccagccgctgccgatgatcggcgccttcggatggttcttctccagcaactggcagaagcggtaaaaattcatgtacggcaactgaggccggagctgcgccatcagccgggcaggcgcagactgtgattctctttccaccggatacatttcccttcaggttgaacaatgagcgtcagctggttgaactgattcatatcggcatacagtgcgaaaaagcggttgagcatgtcgccaaacaggtggacatcgcccgcaccggtaaatccgctaccgtcgagcgtcacttcgatatccagcccgcgcagcaggaagccctgctcgaaacgctgaattcggcgatggctgaccgccagaatggcgtccagacggcgattattgagctcatcctcccgccagttgtagagcgacagcgtgccgcgcagcacctcggcgctgctcatcatgttgagaaaacgggtgcccagatggctcatgacccgccagtggtagcggtcttccgccgggggataggccggcagcgtgggcttacagagattgcagacggtaagcggcgtggctgatatcgactcacagcgatccagcagcgtgctctgtagcgcccggcgcggcagctggccgttagtgccggtgatgcgcaaggagaccgtttcccgcgccagctcccggtcagcctcccattgctgtccgccgaggataagccaggtatcgtgcatgccggttacgccccgttttacgcgggtgtggtagtagcgctccggcgcatggcgacgcatcattcccccctggtgacgaaagcgggtgaaaggcacatagcgcgcctccccggtgcgcccggagccggtcacgctgtcaacagaatagatttcggtatgcccgtcctgcaggcgcttcggacgcaggaggtattcgctctccagcccgctgatggtcaacggatcggcctcaagggtaaacaggttaatcaccggcacacagtgcaggcgcaggctgcttgcgctgacgggtaaatcactttgccagacctcgctgaacaccacctcaagcgtgaaatgcgatatccccgccggcagggtgatgttttccaggccatttagctgcacgaacataaatttttcgcgaaaggtgaaatactcgagcagcagctgatagccgctgaaagcactctcccccttcggccataaacgatcctcctcgctgaatccccccggggaaaaatagccatcgaggcttacccgctctgtctgacccggcagacgcaggtacagcgcggcctggcgtcgggtcagccacagatggagggcgctgccggtaacagcgtcttcccccaggtacagcgccaggtggcggagatcggtctgcgaccagttagccagctcgctacaggcgaatcgtagtcgcagggccgaacgtccgtccggctccgccgtcatcaccgcctcctctatcgccagcgggttaagcgtcagatcgcgggtggttcggtaccggcacacggtatttttcggccccagtgggcgggagctaatctcaaacccggcgggcaccgtttccgccatcttcatcgccggcagcgttggggtcagcaccacgatcgatagcgatggaatagtgcgcaaatagtgcggccacagcatgctgaccagcccctcggtcagctccggcagatcatcatcaattttttcgcgcaagcgacctacggaaaaggcaaagccttcaaacaggcgctcaacgtaagggtccggcgtaccggctttatcgagatccagcatcgccgcccgatcggggtgagcctgcgcgaacgcttttgccgcctcgcgcaggtagcgcatttcagcatcaaaatatcgcagggttaaatcgtccattatgaatattcccttattcgtctacagggagacacgcagcatggctgcgcggtcagattagttggccgtcgggcggccatgagcgaaggaggcctggcgttgcaggttaacgccaatcagtgagggagaaggttcaatatccctcttcgccgggtatatcgtcggtcagcggaacacgttccgcagacgcgcgcacgctgaatatcgtctccggtagcgtaaagtttcgcagcaccagcagcgccagcggtccttcccccgcctcggtacgcagcgtgtagttcagcaacagaccatccggcgctttccagctcaggctccagctgctgctcgttccgggataagcgctgaccaccgccttatccagcagacggatccacccccaggcgcccgggaaatcgccatactggcgggtgcccgtccgggtactgacccagctcagactggcgcccggcgcttcggtgtcagcgggccagctgaaccgccgccagaccggcatctggttcatatagacaagtttctgactgtcgatgaccagctccgtctgcatcacgccgtccgcggtgccgggacgtagcgcaaaatgcaatcccgcttcgccgttggcgaacgcgacgtcggagagatggctcagggtattcatcgcctgcagaaaggccgggttaaacgtcagcccctgagcattgatactgtccgccatccagcggctcccctctttatgcagcacgccgttcagccgggtctgcagaaagcgggcgatgcgcccggtctcgctgtcgaggtattttgccagcagcggcagagagacttcactgctggtatttttaaaggggtagcgaccgccaaaagcgctattccagtcctccaccaccgcgctgcgccactgggcgttgagactttccgccgccggggtcagcacctgctgccaggcctgttccatcgggcgaacaaacagcgtttgcccaaatccactccactgctggcccagccccgccgccaccaggctgccgtagtcgcgcgtttcggttaaatccacggccttgccctggaataccgtctgcgcaagcaaccgggtcatcgcctgcggatcggtggcgttggtgacctgctgcaggcgcagacgcacctgggtgacgcgggtcaggaaggtctgcaggctaagacggctggtgggtgtcccgccgtcgcgattgtccagcagcgccagtacgggcccgaaggtggcatccagaggaccgcgcgcgccggaccgttgatcgatggcgggcgagttatcacggttgaacagctgcctggccgatttgaccagcgaatcggcgatggcttccccggtctggccggttcgcccctgcacgctcagggtgttcatcagcgccaccagcggcgacaggcgcacatcggccatcagggtcagctggtcgatagcatcggagagggtcgccgcgcgctgccagcgcagactgttgaggaaatccagccaggcgccgctgaaatcagcgaaataacgctccgccagcctggctcgcagagcttccggcgacgtcgactgcgcggcagtctgcttcgtatcgctcagcacccagtccatttcatcgcggcgttccgcgaccactttctcaatggccggctgcacggcctgctcccaggcctgacgggtaaacattcccggcaccacctcatcagtgctgaacagacgcgaagcatcggtgtcggcagtcatatccgccaggcgcatatcggcatactgattcgccacctgcgcgagcatcttctggtaaagcgtggactcactgttgcgctggcccagttggcgaattaaccgtgtgcgcacctggctgaccagaccgtcatcgacaggcagacgccaatgcggatgcgacaccagactggcggcataaaatgccagcagcgaagggccgctgccctgccagacggcgtcggcgatgcctgagcgctgcggccagtcctgcattagcgtagtggcgaaccacgcggcgtccattttttccgggcgggtcaacatcagatattgtttcagttgtccgtaagcggtcttcgtcatcttctcacgcagtgggctgtccggcggcagctgcacgaaggcggtgagctgctcttccagatgatgcgccgccgcatcgcgcagcagcggttgcgccatctccccgtagcgcgggaacagcgccgccagcaggtcatcgttctgactgaggccagcgcggaggtaccacggcgctccgtgctgcgagcggtattccagttgagaaagcgttttctgtaacgcggagagcgcatgcaggcgtacggccagcggctgttttcccgccgaggcctgctgcacctgctgctgtgcgatcgccaccaggtggcggttggcgataaaagagactgtcattgaggcggcccagagtaacatcagggcggcggcggccacgctcatcccacgcatccagttgactccctgtttgcgcggacgtagaccggctggcaaccacagcactgagtctggtatcgtttcccagcggttatcccgtccccagtgatgacggacactgcgaccagcctctactgacgcctcactaaataccaccccggccagcggctgcgggcggtaaggattaagcaataccgataacggctccgtcaccgtttccggtttacgggtcaactgatcggccagcgcgagtaaaaaattgtgctgtggttgcccgcatatctgctggatgccctgctctatcagtaacgacgccagggcagtgaactgttcggcaactatttgcggcgtacaacctgcaggtaacaggcagcctacaggctgagtgatacgtccatttttttcgttgcccccctcatacagcgaccagacgtataggggtagtttccagccaagagcttcgtagcgtagctttagagagtgagacacactgtccatttcatctggcgtgagcctgggcttcgttctgttcatcgttgtcaaaacgccgtcaaagcccgatgttacccacaccataccatcagccgggcgataacgcagtttacgcagcgctgtgaaccaggcgttatctaccgctgccccagggtctccaccccacagcaataatgtaccctgatcttcctgccagagttcctgcgtgagctttggggtcagttgttctacgtctctgactgagccaattatcagcagaatacggactttgcgggaccaggcgcgtccatactgatagcgtagagtctggcgaatttcccccaccgtaatatgatggggaggtgtcagcgccacgcgcccttcttcgccgggtaagacgctgtcctgctgcgactgccggcgatataaactctccttcacacggcgggacattgcaggaaggtaaaaaacaaataccaacgccagacagaccaggacaaacgccagtacctgctcgccccgcgtattgatattcagcatgccgccatagcgggtgatcccccaccatattgcagccatcccggccaacgtaagcccggccaggccaaaccggcccaggccattacccggtatattcatcttcactccctggggtgatggtactgataaaatgttcctgttcgctggaaaataacgccagcaggggctgtttacggaggctgaccagatcggctgccagcgcggtcaggagccagggcgctgcgggtcccggaataccgcaccatttttccagcagcgcgatatcttcagctttccatggggtatgcattttgccgccctgcgtgataagcgcggcgcttctttccgtccatttttttgcgtccccgataacggagggcgtatggcaggcgacagtctgggtttccagaaacagggtgatatcgtcttcaaagttcgtcatatctaagggcataggacgtaacagccgtgatgagtgcggcagatggtatttttgcgccacatcatcgctggtcagcagcagcacggccagcccgtcggagtatgctgtaccaccgttgagctggatgaccaggagtaaattgaccgtcagtacaggctgcttcaggcgctcctccacttccgacagtgagaatgagccggtaacggtaatatcatcaggcacggcgcggccaggaatgtgttctttccagagattactgaaactgctggtcagctcaggcgagggattatccgtgatcagggtgacatacagcggtagctcttccggcaggcactgcacgcgctcttctatactggtcagcagcgcatgcatcgcactcagctgcacgggctcttctgccggaaggtaattaatccggcgggtaagtccgtattgctgaggccgctcactcccccaatgcgccgcagaaatatgatccggcaacagcactgcactgcccagaacggccagccagcgccctgcccagtcttcccacctctgctgtccgtattccgcctctttcagcaagaactgatgcgctttcagatccctgtcccacagatagcaacgcaggcaaaaaatcagcaaccagcaccctgcaggcatcagggatacccaccagatatttatcactgagagaatttttacggtgccggaagcatggagggtaaagagcaggacaccgataatcgccatcagtacaccggcaaacagccatcgggtcagtgaaggagccgatggctgctccatggtcaatgcttttgttcgtacccagcccattttttatcctatcgcgcattccggcgcgccggaaatcacctggcaaccgcactgacatttgcagccatcgaccacgatggctttaccatcggaagaccattccggcgctccctcaataatggcattagtgccatgtcccggaatcgggcagctgactttatcccccaccagcgctacgggctttccatttacaatcatggtggaggatgcggaaataacagcaccgccgtgcgtggttttatcgccgagtaatacaaaacctttggacattgaatttccttttatatatcagcgatacagtaattattaattagaatactcaatcgcatctatttcaacctaaagagtgaggcaataacatttaataacagataaaaaccggcgactcctgccaaaggaagaataataaacataaaataatatctggaatatctgcacacctctctttacttaatacatacttcttcccccaggtgatatcccctacattaataatttttcacttcgaacgccaattgccagacgaccttatgctcgcgaaagtcgccttaatttctattgcatgctctatacaataaaaaatacactaacaacaaaataatcagaattataagcaaataaaacagacattttctgattaggtggcaacagtgggtatacctcgctaatatgacgactattgctccctatcattttgcgttcgccataacctatgggaaatccaaagcgttcgcgcatccatcgctgcgtcattactggttcaagactaaaaggcagcgaattaggaaataaccaagccgttttattttcatcttctaaccgcaaagtcacttcctcaagattttttctggttatttataaaagatgaaaatatttcttctcgcctcatatccagcctgaaaatatcatcactaacagtaatcgttggttttgttttgtagggaattaaaccttgttcataaatatcctgataaggtttacctaattgcttcacaagtgttcgatatcaatattcatttgccaccaagtcgctttttctccagcgcaatatgaatctcctttgctcactccagtggataaaaagtcacgatttctgaaaataaatccttgttataggtaaatccgacagaactattttgatgaggcataggtaaggtatatatatctccccccctataagcagtcataacaatttttgcttcaacgtaaaccatcggaaatcctagataagcccgcacccactggtgaatcataactcgttccagaccaaacggcataggattaggaaacagccagtcagttttggcttcatcttcaaaccttaacatttcttctttcagatttttaatgagcaccacattttccgttgacaatcatcgttgatgacgatgaattaatttcactactgtacatgattttaccatccattagaaaaaaaccttatatgttgaacgccaccgattctttaaaataagatatagcatcacacattatttattaacgacacaacgaaatacatactgcggaccaacaccatatttttcatagtcaccatcaacttcttctgggagtggtgaagcagattgtctaaacatagtcaatgcgtactgtctgtcgccgccaacattcccacgcaacactttcttggtcccttgctctggtccctgaggattctttaccggagagtgggagtaataatcttctgcataccagtcattggtccattctgaaccactcagtcccatatcatacaggcctaagggatttgatgggtatttacctactggataaatgggaagccccatcccatcagtgtatttattcagttcatcctggctggggacattttttcctggtgaaaactcaccattgttagtagcaaacggaagatactgacctctggatcttgctgcaaactcccattgtgcctctgtcggcaaatcaatttttttaccggattttttacctaaccactgacaataatcttttgcctgttgccagataacacctgcaggataatccccctttagcagagaaggatgacgttttgccagtatatccacaggtggattttttttatctgttactttcaaataaacattaaaatcatcgttggtgactttatattttgatatcgaaaaatcacttaaaataaccttatgtaaagttttatcatcctgttgtatgctgaaaagtaatttttcaccaactaatggaccaaaatcacccattaaaaactcaccaccctgaacagggaccatattagagaccgatttatccacaagtgctttagctgctttttcactcccggtggtatttccctgatcgcacccgagcagtaaactggcggcaacagaagcaactacgattaattttctcatcttatcacctcagccattgcatcaggcagtcattatccccgtcgggtgctggtcatcaatcatggcaagatattctgacatcaggaaatccggcgtagattaaatatcctatccggttcagccgaatattcgttgagcattctgattcggttaaaataagagatagcatcacacattatttattaacgacacaacgaaagacatactgcgggccaacaccatatttttcatagtcatcgtctttatcgatcttcggaactggcaattttgattgcctgaacatggttaaagcgtactgtctgtcgccgccaatatatccacgcaggacttttttagtaccctgcgcaggtccctggggatcgtttaccggagaatgagagtaataatctgacgcataccagtcattggtccattctgagccactaagtcccatgtcatacagacccaggggatttgggggatatttgcctactgggtaaaatgggaaaccaaaaccatctgtatatttatctaattcatctttacccggaacattttttccaggtaaatactcaccattatttgttggaaactgaaaatattgacctctggatcttgctgcatattcccattgcgcctctgttggtaaatcaatcttgttaccagactccttacctaaccactgacaatagccttttgcctgttgccaggtaacaccaacagaataatctcctttttgcaaggatggataattttttaaaaaaaatatggatgggtgctttttttacccctgttatttgcagatatttattataatcatcgttggtaactttaaactttgatatcgaaaaatcacttaatacaactttatgtaataccttatcatcctggtttatgctgaaaggtagtttttgaccgactaatggtccaaaatcccccattaaaaactcgccgccctgaacgggaaccatgttagagagtgacttagcaacaagcgcttcagacagggtttcacgcttgtcagtactcttctggtcacacccgagcagtaaactggcagcaacagaagcaactacgattaattttctcatcttatcacctaagcctttgcatcaggcagtcattgtccccgtcgggtgctggtcgtcgatcatggcaagatattctgacatcaggctatccgggacaggtttaaacaggctgtccagcggaatattatattcattgagcgttccgactataatatagtattacagtcaaacgatattatttattaataacgcaacgaaatacaaaaagaggactaactccaaacttttgataatcatcacgcccagcaaattttggcacaggttgtgacgattgcctgaatatagtcaaggcatactgacgatctccgccaacatacccccttaaaactttttcattacccttaactggaccttgaggatcataaacaggggagtgggaataataatcagttgaataccaatcattactccattcggctccacttagccccatatcgtataaacctagcggattcggaggatatttcccaattggataaataggaaaaccataaccatctgtgtattcatctaatttcttttgttcaggtatattagaaccaagctcgaaatttccattattagtcgaaaaaggaagatactgccctcttgaccttgccgcatattcccattgtgcttctgtcggtaaatcaatatttttatcggactccttacctagccactgacaataatcttttgcctgttgccaggtcacaccaacagagtaatcatctttttgcaaggatgggtactcttttaccagaatattaatgggaggtttttttattcctgttatctgcagatatttattataatcatcgttggt

SEQ ID NO: 5348 - DNA, 37014 bp, Unknown
  gut microbiota DNA sequence
atttccttgctggctgtgtgagaagttctggaaatggacactgataacgcagccgtccaggatctgattctggccgccgagaatatccctgaaatcaaaaaatacgatatgccgacgctctggaaattcaccagcgccaataaaaaagtcttcccggaagggaaacggcatgagctcggcaaacgtattcagtttgcaaagctgtggttcgccacgaacgcgatcgaccgcggcattctcaccagggaatgggctgccggtaactgcatttcttcggttttgaaaactgatgcaggaactaatgctggcggcggtaataaaaccgatcgcaaccctgactacacccatacccttgatacgctcgatgtagaaatagccctggccacaatgccaatggatttcgatatctacaatttcccggcatcaattcaccgccgggccaaagagatcgttcagaagaaagaaagtccgttcaaggaatggtcggcagcgctgcgcaaggttgcaggcatcctggattattcccgcgccgcgattttcgcccttattcgtggcgccaccagcgacattcatcatttcccggtaagtctgcagacctatatcaatgcgaacctgaccgagcataagcatgtcgccccttctgctgagactcttgaaaaagctggtcatgtttcatctgccgccgtcactctggacgctgtgaaaaaggctatcgatggagatgaaggtgtgcctgacctggaaactctcccaactgactttcaggtaattggcaccgaactggtgaaagaagctcaaaagaaacgccctgacgctaatcaggttctggccgccgaacgtggcgaatatgtcgaaggcatcagtgaccccacggatccgaagtggataaccgaagacctgaccaaacccaaacagcctgaagtttcaaacatgtgcaatggtgttttttcgattgatggtctgatggatagccagccagcaccagcactttctatcgtggaccaggcgcgccagcgcgctgcagaagaaaaattacatccagctaattacggggaaaccaccagcgatgtgcagatggaaacggctcagccggtcgaagacgaaaatgataatgcggtatcagcaggcgaaggcgctgatgagcctcctgcgcaaacaattgccgtgaacatgagcaaaatactggctgaacactgcccggatcttaccgccgaagtgctgaaaagccaggtttcagagagtgctcatagcgatgaagaggaagaggctgaacaagcagcgccagcatggccggagtatttcgagcctggtcgatatgaaggcgtgccaaatgaggtctaccacgccgctaacggcatcagctccacgatggttaaagatgcgcgggtatcgctgatgtatttcgaggcgcgccacgtatccaagaccatccagaaggtacgctcccctgttctggatatgggaaatctggtgcatgcactggcgctgcagcctgagcagctggaaaaagaattcagtatcgagccggaaatcccggaatgcgccttcaccactacggcgacgatccgcgcatttatcgacgaatacaacaccgggcttccggttttactcagcgcagatgacatcaaaagattcctggaggaatacaacgcgaacctgcccgcccaggttcccttgggtacatcagttgaagaaaccggccagggttatatgtctttacctgttgagttccagcgcattgaagacggtcagaagcaaaccgccaccgcaatgaaggcctgcatcaaagaatacaacgccaccctgcccgcccaggtgaaaaccagcggtggccgcgatgccttactggaacagctggcgcttattaatcctgacatggttgctcaggaagcacagaaggcgcagcccctgaaagtctctggcacaaaggccgatctgattcaggccgtgaaatcggtaaaaccggatgccgtgtttgccgacgagctgctggatgcatggcgcgagaacccggaaggaaaagtgctggttacccgccagcagctggctacggcactggccattcagaaagcactgttgaatcacccgaccgctggcaagttgttgacgcacccgagccgtgccgtcgaggtgagctatttcggcattgatgaggaaaccgggctggaagttcgcgtgcgccctgaccttgagatagacatgggcggcctgcgcattggtgcggacctgaaaaccatcagtatgtggaacattaagcaggaaggcctgcgcgcgaagctgcaccgggaaatcatcgagcgcgattaccacctgagcgcggctatgtactgcgaaaccgcagcccttgaccagttcttctggatattcgtcaacaaagacgagaactaccactggatcgccatcatcgaggcatccgaagaaatgctggaactcggcatgctggaatatcgcaaagcaatgcgtgccatcgcgaacggtttcgacactggcgaatggccggcgccgattaccgaagactacaccgaagaacttaacgattttgatatgcgccgtctcgaagcgctgcgcgtacaggcataagggggaacagtcatggaaaacactaacattgttacagccgaacagcaggcaccaaacaccatttcagctagcaacgcgatctttaacgttcaggctctcggtcagttaactgctttcgcaaaccttatggctgattcacaagtgacagtgccagctcaccttgcaggtaagccagccgattgcatggccatcgttatgcaggctatgcagtggggcatgaatccctatgcagtcgcgcaaaaaacgcatctggtaaacggcgtgctcggatatgaagcccagctcgtcaacgcggtaatcgccagttccagcgctattaacggtcgatttcattatcgctacggcggcaactgggaacgttgcacaaggacgcaggaaattaccagggaaaaacacggtaaaaatgggaaatacagcgttacagaacgggtgcgcggctggactgatgaagacgaaatcgggttattcgtccaggtcggcgcgattctgcgcggtgaatcagaaatcacctggggggagccactttatctctctggagtcgtcacacgtaattctcctttgtgggtttctaacccgaaacagcagatcgcttatctgggcgtcaaatactgggcacggctgtattgcccggaagtcatactgggtgtttacagcccggatgaagttgaacaaaggaccgagcgagaaataaacccggcgccggcgcaaagaatgtctgtcgcagagatcaccagcggaacagacatcaccaccagcgcgcaggattcagctctcaatattgattccctggcagatgatttccgtgaccgcattgagcgcgccgaatcggtcgatgcagcaaaagccatcagggcggatctggataaagagaaagctgtgttgggcactgttcttttcaccgaactgaaaggtaaagccgtgcagcgttatttcatggtagacgcccgaaacaaagttgaggccgccattaattcacttcctaacccgggggatccggaagccgaagcgttattcgcgaaggcagaaagcaccctgacctcatcgcgccgccacctcggtgatgaactgtatgagcagttccgcatcaccctggacgacatgaaaccggaatacgtgggctaagggaggcgggagggttcgccctcccggtaacgatatgacgaaaattactgaacgcgggatgatttttaacggggagatggtgcgggcattgttggatggccgaaagacgcagacgcgcaggattataaaggactgcacggtcggaagagaccaaatttcaaaattcattcagatcgagaagaagtttatcggctgctacccggaagatgtacctgaactgatcagggaatgctgcccatacggaataccaggcgatcgcatctgggtgcgggaggcctttcgggtgcatagccgggctacagacgtcgccaccctggtatacaaagccagcgagcgaaattcatggactgagcaaacccaccgtgtacccgtagctgtctgcaataagccggcaacgcctgagaaatggactccttcgctgcacatgccgcgctgggccagccgcattctgctggaaatcaccgacgtgcgggttgagcggctaaacgctatcaacgagcatgatgctcaggcagaaggcgtggcgaagctacgagggggcttctggaagcactatcagccaggctggactcaacatcaactgagcgcccgcggctcattcgtaaccctttggaaatcaatctacggcgacgaatcatggaattccaatccatgggtttgggttattaagttcaaacgaattgaggacctgacagcatgagtcttaaacatcgattacctgagctggaagccagcatcgacccggcagcattgcgtgcagccgccgacgaatattcggatctgcttctgactttgtgcttatgcatgaagatggccggccccacccgggcgaacgtgcgcgcctgcgccaccgagcttaaaaaacgcctgacaacctggcacagccataaagagctcaatgcaattctgtccagttgggatcccgttggctatgttctcggcctccgccgtgaagcgaacgacaacgcgcgcgcagctggcgatccggttgatgtctttgtgtgaggtgaatatgcgactgattaaccgaagcaaacaatcaccgctgggccgccaggcgtgcgatgcggcactggcaaaacacgttgagctttatggagcctacgggcgacagaaaacgaaaagaacttatacggtggtggttcaaggctcaaagatcactgtagaagttgttaacagaaaaagtagctatgtggccacagccatgagctgcgcgcgccggctacaccatctgcctggacaatgtaactaaggggtttttatgactaatacatctcataaatcagatgaaattttgataaccgatgacgttctgtccagatacaaaatatcgcgcagcacactctatttctggagcaccccatcccggatgccctcttactttgctcagccattcccgcagcctaaaataaatggcagccctaaaaggtggagactttcagacctgctggcttgggaggataacgtggggatcaaaccagaggctgaccaatcagcttctcaaggtgatcctgccaaacagcaagccagtgacgctgatcatccagataatcatgcaggttataacgtgccatgacacctgccatatgatggccaagcagtttttccacaacatgtggcggcgcacctaattcagaaaggcgtgtcgccactgttcgtctgaggtcatggagagaccagggcttcatgcctgttttagctataatctgagcagaaaacagagcgacgtttggttgtagtggcggtctgtcatcttctggccctctgtagcgtgacagtgtcacaacgtgttttgaaactgacgtttccttctctgctaacatcattcttactactgcctcgggaagtgcccttctgaccgatttcccggttttataatcgcttgccggaatggtccacgtttgctcatggaaatcgaaccactcccatcttgctgtcctgatctctgtactcctgcagccagtcatgatgagaaacttcattatcagctgttgtctgtacttcaattcaggaaggatattccaaactgttttgatttcctcatcactcaatctgcgatctttaacggatgctgtgagacctacgtcagagcgcctaaggctctcaattgggttcacattaatgacccctcgattggagcaaaaacggaacgtacgctgcatcagcccaagcatctgaccagtgacaactcttcgccccatgccatcaaaaaggttaagccagtgcgctttagtggtctgatcaacaatcatgttccccagcacaggcgctatatggttattgaagtcccgtcggttaaccttaattttcacaagaccttcagggatgcagtaatacttttcccagtaatcgaaagcctctttaacggtgagcgcttcgacttttttctgtttctccagaactatttgccgtctcggatcgagtccttctgtcaaccacgccctgaactgctgtctacgttcgcgagcttgagataaggaggtggtgggataatcgccaatcgttagctgagcggctttcccgttccatctgtagcggtaaaagaatgttatactgccggaagtagacaaccggacattcagaccatgagcgtccgatatgacctcgatctggtctctctttttgccaagagcttttcttaattttgtgtcggtaagcaatgtgtacactccggaagatgatatacacatcagtgtacacattttggttaaattgataaccttcaaatcaatgcagaacacacaaaattaaagcactgaatgctggcaatgtgttggtattagcgggatttttgaaaagacttaaagcatgactaacaaacttaaaacggattcatatgccctacgatagcgtttatctggaaaagcgtccgcccggcgcgctgcgcaccgtatggcgtaagttctatggcgacaccacggcgatgatcggtctgtacggctgcgcgggcctgctgctgctctgcgtcttcggcggctggttcgccccctacggcatcgaccagcagttcctcggctaccagctgttgccgccgtcgtggtcgcgctatggcgaagtctccttctttctgggaaccgatgacctcggccgcgatgtgctgagccgactgctgagcggcgcggcgcccaccgtcggcggcgcttttgtcgtcaccctcggcgccacgctgtttggtctggtgctgggcgtgattgccggatcgacccacggcctgcgctcggcggtgatgaaccatatcctcgacaccctgctctccatcccctcgctgctgctggcgattatcgtcgtcgcctttgccgggccgcatctgagccatgcgatgttcgccgtctggctggcgctgctgccgcgcatggtgcgctccgtctacagcatggtccacgatgagctggagaaagagtacatcatcgccgcccgcctcgatggcgcctcgacgctgaatattctgctgttcgccatcctgcccaatatcgcctccggcctggtgaccgagatcactcgcgccctgtcgatggccattctggatattgccgcgctgggctttcttgatctcggcgcccagctgccttcgccggaatggggagccatgctgggcgatgcgctggagcttatctatgtggcgccgtggaccgtgatgctccccggggcggcgattatgctcagcgtactgctggtcaacctgctgggcgacggtattcgccgggcgatcattgccggggtagaataatgccgttactcgatattcgtcacttaaccattgaatttaaaaccagcgaaggctgggtaaaagccgtcgatcgcgtcagcctgacgctgaccgaaggcgaaatccgcggcctggtgggggaatccggctccgggaaaagccttattgccaaagctatctgcggcgtgaccaaagacaactggcgggtcacggccgaccgcatgcgcttcgatgacatcgacctgctgcgactgtcgaaccgcgagcgccggaagctgatcggccataacgtgtcgatgatttttcaggagccccagtcgtgcctcgatccctctgagcgcatcggccagcagctgattcagagtatccccggctggacctacaagggccgctggtggcaacggctgggctggcgcaagcgccgggccatcgagctgttgcaccgcgtcggcattaaagatcacaaagatgccatgcgcagcttcccctatcagctgaccgagggcgagtgccagaaggtgatgatcgccatcgccctagccaaccagccgcgtctgctgattgccgacgagccgaccaacgccatggagccgaccacccaggcgcagattattcgcctgctgacgcggctcaaccagaacaacaacaccaccatcttgctgatcagccatgacctgcaaatgctcagcaaatgggcggataaaatcaacgtcatgtactgcgggcagacggtggagagcgggcccagcgaagagctgatcaccctcccacatcatccctacacccaggcgttaatccgcgcgatcccggatttcggtagcgccatgccgcataaaagtcgcctcaacaccctgcctggagcgatcccgctgctggagcagttgcctatcggctgtcggctggggccgcgctgcccgtacgcccagcgggagtgtatcgaaacgccgcgtcttaccggggcgcgcaaccatctgtacgcctgtcatttcccgttgaacatggagaaagagtgaaatggtcgaaacattgctggaagttcgccaactcagtaagacctttcgctaccgcaccggctggtttcaccgtcagacggttgaggcggttaaaccgctgagttttaccctgcgcgaacggcagacgctggcgattatcggcgagaacggctccgggaaatcgaccctcgcgaagatgctggcgggcatggtggaacccaccagcggcgaactgctgattgacgatcatccgctgacttttggggattactcctaccgcagccagaagattcgcatgatctttcaggatccgtcgacctcgctgaacccgcgtcagcgcatctcgcagatcctcgattttccgctgcgactgaataccgatctcgacgccgaagcgcggcagaagcagataatcgacaccctgcgcatggtcggtctgctgccggaccacgtcagctactacccccatatgctggcgcccggtcagaagcagcgtctcggcctcgccagggcgctgatcctgcgcccgaaggttatcgtctgcgatgaggcgctggcctcgctggatatgtcgatgcgctcccagcttatcaacctgatgctggagctgcaggagaaacagggcatctcctatatctatgtcactcagcacctgggaatgatgaaacacatcagcgatcaggtgctggtgatgcataacggcgaagtggtcgagcgcggcagcactgccgatgtgctggcctcgccgctgcacgacctgacccggcgcctgatcgccggccacttcggggaagccctcaccgccgacgcctggcgcaaagacgggaaatagctggcaggcaacggcaggggcggccctcacgccgcccttgtcattcaggtagaagggaaaagactctgcgccggcagcgaccggcggtcaaagcggcgcagcgcgtagtaaagaaccccggtgccaaaccaacctattatccatgagacatcgttaccggcgaagatccacgtgagcgaaccatggaacaacgggttctcaatgaacggcaactggataagcacaccgacgatatacagggtgatcgcgtacaggttccagaacccgtagcgttgctgcgggtcgcttagcgccggaatatcgatggcgcccttcgagataagataataatccgtcagacagatggcgctccacggcacgaagaacgccagcagaaacagaagaaaatgcgtgaaatgctttaagaaagcgggttcgctaagcaacgcgataatgcaggaagccgtcaccatcagcaccacgaatgcaatgcgacacttttgcgacagcacggtttgccggcggaaggcggaaacaatggtggtcagcgacataaagctgccgtacgcattgagggtagtgaaggtaattttaccaaaacagttggcgaaatagataaccatggccatcgcctgactcttacctaatcccaccagatagctcacctcgtgaccagggaacgcgctgccggcaatggccgctgtcagaaccccgagcgtcatcgacgtttgggtacccaatacggtgccgaaaaacactgagcaccacgttttcgtggcggaaacatcgcgtggcaggtagcgcgaatagtcggatacataggggcaaaaagcgatctgccacgatgaggagagcgatacggctaataaaaacgtcggcagcgaaaaatggttattgtgcgcgagcgcactgagatcggccgaaagtagcagcgtgatgaacatataaacgaaggcgagaattccgacgatactcgccagtttgcccagcttgtggatcaccttataaccgaggacggcgataacgataataatcgcactgaatatcagcatcccggctacgtggctgatattcagtagtttggccattgcctgcccggccaatacggtgccgctggcagaaaaaccgatatacatgacgcaaaccagcaccagcggcaccaccgcgccaaaaaccccaaactgggcgcgactaaggatcatttgcggaagtcccagtcgcggtccctgcagcgcatgcagagacatcaccgccgcccccagcatctgaccgaccagcagcccgaccagcgaccacactacatcgccgcccagcacaacggctaaagcgccagtgacaatcgccgtaatttgcagattgccgccaaaccaaagggtgaactggctaaaagggtgtccatgccgttcgctttccgggatgtaatcaatcgaccgcctttcactcattccagcataattgctctttgactgcccgtctgtagacgaaaacgaagacataggttcctcactcaagttattaatatcacctcactcaatcgttcttgtatatacaagcattgacaactcaccgccttgcatgcactctcattttgtgacgaatatgtaaaatatttgtattgcagaaagttactaaactagctcaaggcggtgcttattgttgacgccggaagcgattaactaaggtatgctgcccatgatggtcccttttcaactttcgacgctccccgtcacgccgtggaaaaacggcggcggagagacgcgcgaaatcatctgcgtacccgctccagatgccccttttctctggcgagcgagtattgccaccctgcaggcggatggccctttctccccctttcctggcgtcgaccgggtcattactctgctggcggggcagccgctacggctgtgtggcgagaatatcgaccaaccgctggcgctctggcagccgtgggctttccccggcgaatgggcgctgtccagcgtcgggatcgttgcgccagggctggacttcaatatcatgactcagcgcgggcgcgcgtcggcgacagttcaggtcgttagagacctgcaatgccctgccagcgagggggtcgcttatgttctacaaggcgagtgggatctggccgggcggcgctgcgcggccggcagcggcctctgctggcgcggtggatccccgcggaatctgcgtcccctgggcagcaatggacgcctgctgctggcggagatcgcgctcaaataatcgtcaggagagatgatatactgcagctatcgcgatgtacttttgccccgcgcggcgcggaccggctgaaaaatatcgtgacacaaggggtcgtcagtgggatataattcccggctaaatttgagttattttgaaataacaatgttaacgttatgattgttaaagtaaaaataagcaataacgataaggattaaagctatgggttttctttccggtaagcgcattttgatcactggcgtcgccagcaaactgtccatcgcctacggcatcgcgcaggcaatgcaccgcgaaggcgcggaactggcattcacctatcagaatgagaaactgaaaggtcgcgtagaagagtttgctgccgcgctgggttctgacattgtgctgccgtgcgacgttgctgaagatgagagcatcaccgcgctgttcaccgagctggaaaaagtctggccaaaattcgatggtttcgtccactcaatcggttttgccccggctgaccagttagacggcgactacgttgacgttgtcactcgcgacggctttaaaatcgcgcacgacatcagcgcttacagcttcgtggcaatggccaaagcctgccgcggcatgctgaacccgggttcggctctgctgacgctctcctacctgggcgcagagcgcgcgatcccgaactataacgtgatgggtctggccaaagcctctctggaagctaacgtccgctatatggctaacgccatgggtccggaaggcgttcgcgtcaatgccatctctgccggtcctatccgtacgctggccgcgtccggtattaaagatttccgtaaaatgctggcgcactgcgaagcggtcaccccgatccgtcgcaccgtcaccattgaagatgtgggtaacagcgcagccttcctgtgctccaacctgtctgcggggatctccggtgaagtcgttcacgttgacggcgggttcaatatcgccgccatgaacgagctggaactgaaataagttccttcccctcctcgccccggtgaggagggttcttccatcccccacgccttacgccccacctgttattccaatcggctatttgttagcacgtatcaatattttctcctgcttccgggttacgccaggatagttctgcataaacgatccgcggaacggcggttcgccacataccgaacaaggaaagcccatggagccacgccgcgtgaatggcaaaaatcactggtatcacgaaacccagtcaacaatctgcccggtggatgtcctgccgctcgtccctgaagccgcccatgttgaagaccgctttttgctggacctgacgctgccggccgcctggctacgtgcccacgctgactggctacaccccgcacgccagctggccgaactgctgtttcccgaccaggtggcggtgagtcgcctgcagacctttaccgcttacgatcgactcagcaccgcgctcaccgtcgcccaggtctacggcgtccagcggctgtgtaaccactacgccgcccgccttgctcccctgccaggccccgactcctcgcgcgagagcaaccgtcgtctggcgcaaatcacgcaatatgctcgtcagcttgccggttcgccctcggttattaacgctctctcccgtagccagctggacgaagtgggcttaaccagtcgggacattattctgttcaaccagattatcggattcgtcggcttccaggcgcgggcgattgccgtcctgcaggcggcccagggctttccggtgcgctggatccccggtatgccccagcaagaggaggcacccgcggagctgttcgccccgccgccgggagcatggcaggcagacattgcggatcccgacctgcagtatgccgatgatgagcgtcagcggcgcatcgccggctggcagtcgctgcccggtctggacgagctggcgccgctgctggcctgcgacccacagttattcgcgcctctggagaccttgatccgccagctcagcacggatgatacctttggcccgcaggtcgccttactcacggcgcgcaccaatggcagccccacctgttttgacgcctggctcccccactggcagggtgaagaggagttcgccagccatctgcgggagggcgaccaggccctccatcactggctccagcagcatcctcaggcccggtctctcgtgaccgcggtgcagctgttaacccgctcgcctgaccggtttagcgccgcccagttaacgcccctcgcggaatatcgactctctgagcaacaagcaatcgatctgttgatctggagcgggctgtgcggatggatgaatcgtctgaaaatcgccctcggcaatgtgcgtcagcagacgtaaattgctgaaacagcgcttgctgcggcaggcatattcgcgtaaaaatgtcagccgctcttttagccacgaaaatacctaattatgtttcaggataacccgctgctagcgcagcttaaacagcaactgcattcccagacgccgcgcgcggaaggggtcgttaagggcacggaaaagggctttggcttcctcgaagtggacgctcagaagagctacttcattccgccgccgcagatgaaaaaagtgatgcatggcgaccgtatcgtcgcggtgatccattctgaaaaagaacgcgaaagcgccgagccggaatcgctggttgagcccttcctgactcgttttgtcggtaaagtccagaagaaagacgatcgcctcgctatcgttcctgaccatccgctgctgaaagacgccattccctgccgcgccgcccgcggcgttgaacacgattttaaacagggtgactgggccgtcgccgagatgcgccgtcatccattaaaaggcgaccgcgggttttacgcggagttgacccagttcatcacttttagcgacgatcacttcgtcccatggtgggtaaccctggcgcgccataatcttgagaaagaggcaccggacggcgtcgccaccgagatgctcgacgaggggctgacgcgccgcgacctaaccgccctcgacttcgtcaccattgacagcgccagcaccgaagatatggacgatgcgttgtatgccgaatccactgctgatggcaaactgctgctgacggtcgccattgccgacccgaccgcctggattgccgaaggcagcaagctggataacgccgcaaaagtgcgcgcctttaccaactatctgccaggcttcaacattccaatgctgccgcgcgagctgtcggacgacctctgctccctgcgcgctaacgaagtgcgcccggtgctggcctgccggatgaccctggcggccgatggcaccatcgaagacaatatcgagttctttgccgccaccatcgaatcgaaagccaagctggcctatgacgacgtctctgactggctggaaggccgcggcagctggcagccggacagcgaggcgatcgcgcagcaaattacgctgctgaaggacgtgtgccagcgtcgtagcgaatggcgtcagacccatgcgctggtgttcaaagaccgtccggactaccgtttcgttctcggcgaaaaaggcgaagtgctggatatcgtcgcggaaccgcgtcgcattgccaaccgcattgtcgaagagtcgatgatcgccgccaacatctgtgccgcccgcgttctgcgcgacaagctcggcttcggcgtttataacgttcataccggtttcgacccggcgaataccgagcagttggccgccctgctgaaaacccatgatgtgcacgtcgacccgacggaagtgctcaccctggaagggttctgcaagctgcgccgggaactggacgctcagccgaccggtttcctcgacagccgcattcgccgcttccagtcgtttgcggaaatcagcaccgagccgggcccgcactttggtcttgggcttgaagcctatgccacctggacctcgccgatccgtaagtatggcgacatgatcaaccaccgtctgctgaaagccatcattaaaggcgagaccattgcgcgtccccaggatgaagccaccgtgcagatggcggagcgccgtcgtctcaaccggatggccgagcgcgacgtcgccgactggctgtacgcccgtttcctcaacgataaagccgggaccgatacccgcttcgcggcggagatcatcgacgtcagccgcggcgggatgcgcgtgcgtctggtggacaatggcgcggtcgcctttattccggccccgttcctccacgccgtgcgcgacgaactggtgtgcagccaggagaacggtaccgtgcagatcaaaggtgaagtagtctataaagtgactgacgttatcgatgtcactatcgctgaagttcgcatggaaacccgcagcattattgcgcgtccggcggtctgacgccccttcacagcggttcctgcgggaaccgctgcttctttcctctctatccagccatttccgtcgcaccgattaaggttgtgcgtttttttcgcttctctttttcattcatttttagcatcattgatttcattcgtttttgttaccaggataatgccatgtcagatgtgaatgcccacctgctcgctcaacgtatcgataccgtgctggatattctggttgccggtgattaccattctgcgatccataatctggagatcctcaaagcggagctgctggcgctggcggcggacgatgctgaacaacaaaaccaacccaaggcgccctgggaaatctgaatatcagccatgccgcagccggccatatggaccggttgctcgccatatagccccctaacagtgatgttgctatgaacgcccgacaacaaagtattttgcaagtggtcatcgataaaggccgcatgagcgtcgccgatctggcgaagatgaccggtgtctctgaggttactattcgtcaggatttgaatttgctggaaaagcagagctatttgcgccgtactcatggttatgccgtaccgctggacagcgaagatgtcgaaacccgcatgatgacccatttcgccattaagcgtgagctggccagccgggctgcggcgctagtgaataccggtgaaacggtatttatcgaaaacggcagcagcaatgccctgctggcgcgtacgctggccgagcgcggcgatatcaccatcattaccgtcagcagctatatcgcccatctactgaaagagaccccaggagaggtgatcctgctgggcggaatttatcagaaacgcagtgagagtatggtcggtccgctaacccgtcagttcatccagcaggtgcatttcagcaaagccttcatcgggatcgacggttggcaggcggaaaccggctttactggccgcgatatgatgcgtgcggacgtggtgaacgccgtgctggagaagcattgtgaggcaattattcttagcgacagttcaaaattcagcgcggtacatccctatccgctcggtcccgccggccgctttaatcgcgttattaccgacgatcgcttaccggacgcctgtcgcgaacaattgctccgcagcggcctgaccgtcgatatcgtgccctacatctgatcctccgtcgccccatctcctgccaaagcgccggaaggggcgctttatcgctctgagagtattccgagccgctaattaagactttttacctgacgataaattttaaaaaaagtaaaattattattagcgatataacaggaagtgactatcacctgcgtgattttcgtgacacctgcgcaccttaacttcatggaattgccctaaagctgctttatcaggctatgcttagaggagcgctgtaatccatgaatagattattcaggagaaaaaaaatgatgacttcaacgagcaaaaaaatggctgctgtcgttctggctgtcactgtagcaatgtctctgagcgcttgctctaacatgtctaaacgcgatcgtaacacggctatcggcgctggcgccggcgctatcggtggtgcggtgttaactgacggtagcgcgctcggtaccctgggtggcgcagcagtcggtggtattattggtcaccaggtcggaaaataatttaattatctgacgaaataaaagaataattcacacgaattgacttacgcacgttaaatcattcaaggccgcggcatttaccgcggccttgttatttcaaccagaccattggagcagagggaaaatagcgatcagccaccggctaacttgaccttcatccctttcgcctcaagcagcgacttgagtaaatcccgcttatcgccctggatctcgatcacgccatctttcaccgcgccgccgcagccgcacttttttttcaactctgccgccagagcggttagcgcagcatcatcggcatcaatcccgctaatcagacagacgcctttgcccttgcggccgctggtctggcgctggatccgcacaatgccgtcgcctttcgggcgcaacggcgccggtttcgcctcgtcgatacgcccggtttcggtggagtagaccagacggctgttggaatcgctcattatgcccccttgcgcagagaatcgttgatcgcccgcagcgtcgcggctggatccgccgactgagtaaccgggcgaccaatcaccatatagtctaccccagcttcctgagcctgctcaggagtcataattcgccgctgatcgccagcgtcgctgccctgcggacgaatccccggggtcaccagcttaaacgcctgccccagctcatgcttaaagcgcacagcctcctgggctgaacacaccaccccatcaaggccgcagcgttgagtcagcgccgccagcttcgccgcgtagtcagccggagataaggtaatgcccagatcctgtagatcgctggactccatgctggtgagcaccgtgacagcgatcagcagcggcgcatctttgccaaacggcagcagcgcttcgcgcgcggcggtcatcattcgcgcgccgccggaagcatggacattcaccatccatacgcccagctcagccgctgcggccaccgcgcgggcggtggtgttgggaatatcgtgaaacttaaggtccaggaacacctcaaacccacgctgatgcagatcgcggacaaactgcgggcccagcagggtgaacatctctttgcccaccttcaggcggcagtcgcgcgggtcgatgcggtcgacaaatgccagcgctttatcgcgattatcatagtcgagcgcaaccacaacgggagaggatgtgacagcgcgggaagatgggatagctgtagacgtcatgaccagaccttagtgttgatgggcgccggggtggcgcaaaaaaggtaaacgggcagcattctacctgtgaagcgaacaaaataacagactgccgtacctgccctgaccggacgatggcgctgccggggccgcgcctggagaggagtgaagcgataagtatgttgtaactaacggagggcttttttttggctttactggccgtcgagaccgcgaatgggtttaatggtcgcccacgagcggcaggacggacaatgccagtagagtgtatgagcggtaaacccgcatttctggcagcgatagcgtggtttgctgcgcacctgctcaccaaccatgtttcgcagcaccccaaggctttctttcgcccgcccttcttccgcttcgttgagatggtagtccatcagcttatggaagacgcgcatggtcgggtggcgttccagctgccgggtgacgtagttttgcgccgcttcgacgccttcccgttgctcaaggatctgcgccagcatcagttcggcggtcgccccggcgttctcctccacgcagcggcgcagaaaaacttcccattcatcggttttgccgagctgctggtagcaggtctgcagcatctccagcgtttcacccaccagctctttatcctgatcgataacccgctcgaggctctccaccgctttggcgtagtcgcccttttccatccacacccggcccatcatgatcgatacccgggcgctggtgcggtccgcggcggcgccttttctcaacaacgccatcgctttatccagatcgttggctgccatctgctgcagggccagttcgcaccagaagttggcgatttcgccacgatgtttctcttttcccagcttcaccagccgttcagccacttcaatagccgactgccagtcgctggtcgcctggtaaatctgcagcagttgctgcagcgcgccgaggcggaaatcggtctcgtccaccagctgtttgaacatgtcttccgcgcggtcatacagtccggcggccatataatcccgtcccagctgctgcaccgctaacaggcgctgatcgtaggttaacgacgcgctttccatcaggctctggtgaattcggatcgcgcggtcgacctcgccgcgcgaacggaacaaattaccgagcgtcaggtgcgcctcaacggtaccggtatcctctttcagcatatcaaggaacaggtcgacggctttatcctgctggttgctgagcaggaagttaacccccgccacgtaatctcgcgacaggcggctcgcatcgtcctgtttggactgttgtgcacttctgcgccccatgtaccagccgtaagcggcggcaacgggtaaaagcagaaacaacaactccagcataagaggttattccttcaccgcaggcacgcctgcgtcgacagccgccgggctgacgggggcaatctgatgctcaagacgcttaattttccgctccgcgcgcgccagtgagacacgcacccgcagccagaacaggccgcagatcagccagccaatggcaaagcccgcggcaaacagcaccgccagcagcgtcgatatgcggaattcaccctgagcgagtaaatagttgaaagtgacctgttggtcattctgcgcccccagcgtcactgaaatgacgaagattgctaacaccagtaagaaaatgagtaaatatttcacatgacttcccgttatgtgggttgcgcgaaaaaagcccgctttcagccctataaagtatcattttcgccgcagcggtggaatgaaaaagcatggcaactcttcaggatatgcggtcggatgccgctaaaatcaacattattccgcttcaggcatccgttttttaatatcctgcgcctcttctccgggcggcgagagcggcccacaaaggcgctgcgtcagccagcaggccaccgtgaccagcagccaggagatcagcgtggcgacgatgagatccagcggccagtgcatgcccagcgccaggcgactgcccatcaccgccgtcgcccacaccagcagcaccgcgattgtgccccagcggcgacgcggccacagcagccccgcagcgagtaacgcccagctggcggcaaacatggtgtgacctgacgggaaagcaaaccccgtctccttctgccagtgtttgcgtaaaaatgacggaatgtcctgcgcctgcgccagctgttcatgcaccagtttagcgcgttctttacgctttaacgcgtagaattgcgtcaccggcacctgccttgtgttttccagccagatgacgaacggtctcggctcctggacccgcgccttgacccaggatttcgccccctgtcccgccaggatagcggcggcaaggataaggaacaggatcaacgccgcgcgcaggcgaaagcgcagacaccagaggaaccagccgcaaagcacgacatgagtgataattccccacggctgggtcaccgtttccgtcacccaccacaggcttttcaacatggcaaccggcagtccaggctgccacagccacccggaaagccagaccgtgaggggcataaccagcagcagcgccgccgcgagagcagttcgtcgggctatcaacagcattttctctccttctccttgtagatgaacatcatagcggaaagtagatcgtttgtgcgctttccacacggctaaccgttcgcgattaggagaacgtccaggcgttgtggcaaaatagtgggaaacagaaagcacagtcaggtgctgacagaatctggagaatcacatgcagcttaaacgtgtggcagaagccaaactgccaaccccctggggcgatttcctgatggtgggttttgaagaactggcaaccggacaggatcatgtcgcgctggtgtatggcgatatatcagggcagtcgccggtcctcgcccgcgtacattcagagtgtttgacgggcgatgccctgtttagcctgcgctgtgattgcggctttcaactggaggcggctctgtcgcatatcgctgaagaaggtcgggggatcctgctgtatcaccgccaggaaggacgcaacattggtttattgaataagatccgcgcctacgcgctgcaggatcagggctacgacactgtcgaagcgaaccatcagcttggcttcgccgccgatgagcgcgatttcaccttgtgcgccgacatgttcaaattgctcaacgttgagcaggtgcggttattaaccaataacccgaaaaaagtggaaattcttaccgaagccgggatcaacattgtggagcgggtgccgctgatcgtcgggcgtaacccgaaaaacgctcactatctggacaccaaagccgccaagatgggccatctgctgaacagcaagccgacggaataaaccggtggaataaccgaaaaagggccagcgatgctggccctttgtttcacagcatattacgaataacgtagtgcaggatgccgtcgttgcggtagtaggtgagttcggtcgccgtgtcgatacggcaccgacaagggatcgcttcctgcgagccgtcagcgcgagtcagggtcaccggcaccgtagcgccaggctgaagcgactgcagattgctaatatcaatccgctcttccccggtcaaccgcagcgttttgcgggtgacgccctgcgggaactccagcggcaaaatgcccattccgatcaggttggaacggtggatacgctcgaaggactcggcgatcactacccgaatccccagcaggcgcggccccttcgccgcccagtcacggctggaacctgatccatactccttaccggcaatcaccgccagcggtgtgccctcagccttgtacagcatcgccgcatcgtagatcgccatcggttcaggatccggcagatggcgggtcatgcccccttccacccctgggaccatttcgttacggatgcggatattggcgaaggtgccacgcatcatcacctcatggttaccgcgacgggaaccataggagttaaagtcgcgccgggcaaccccatgctcctgcagatagcggcctgccggactatcggctttgatgctccccgccggcgaaatgtggtccgtggtgactgagtcgcccagcatggcgaggatccgcgcgccgcgaatatcctctaccggcagcggctcggcgcccatctcgtcaaagaacggcgacaagcgaatataggtcgagtcctcctgccagtcgtaggtatctgacgcctccaccttgatcgccttccactcctcagtgccggaaaacacttccgcgtactctttgcggaacatctcggtggagacctgttccaccgcacgggcaatctcctccccgctcggccagatatctttcagatagaccggctcgccattcttgccctgtcccaacggctcgcgggtgaggtcgatattcatgttccccgccagcgcataggcgaccaccaacggcggcgaggccagccagttggttttcaccagcggatgaatacgcccttcgaagttacggttaccggagagcactgccccgacggtcagatcgccttttttgatcgcttcttcgataggttcaggcaatggaccggagttaccgatacaggtggtgcaaccatatcccaccagattgaagccgagctggtcgaggtaaggcgtcaggccggcatgggccagataatccgacaccactttcgagcctggggccagggaagctttcacccacggctgcggctgcaggccgcgttcgacggcttttttcgccagcaggccggcggccatcaacacgctggggttagaggtattggtgcaggaggtaatcgctgcaatagccaccgcgccatccggtagcgaatagtgatgcccgttcagcgtatagtcaaccggctgacgctgacgctgaaggtggttaacctccagctcgccgctggcggcgaaggctttcggaacatcgcccagcgccacgcgatcctgcggtcgcttcggcccggcgaggctcgcttcgacgctgctcatatccagcgccagggtactggtaaagaccggctcatcgccaggctggcgccacatgccctgggctttagcgtaggcttccaccagcgcgacctgttcttcgctacggccgctgagacgcatatagctgagcgttacgtcatcgatagggaaaaagccacaggtggcgccatactccggcgccatattggcgatggtcgccctgtcggcaaggggtaaggtatccaggccgtcaccgtagaattcaacaaacttgccgacgacgccatgctgacgcagcatttgggtaaccgtcagtaccaggtcagtggcggtgatgccttcgcgcagtttgccgctgagcttaaagcccacaacatcggggatcagcattgacaccggctggcccagcatagcggcttccgcttcaatcccgcccacgccccagcccagcacgccaagaccattaatcatggtggtatgggagtcggtgcccaccagcgtatccggccacgccatccactggccgttcacctcctcgctccagaccgcccggccaaggtattccaggttcacctggtggcaaataccggtgcccggcggcaccacgctgaagcggctgaaggcctgctgcccccagcgcagaaaagcgtagcgttcgtggttccgctccatttccaggcggacgttgtcttcgaaggcctcatcgtcgccgaagcggtcaacggtcaccgagtggtcgatcaccaggtcaaccggcgatagcggattaaccttcgccgtatcgccgccaaggcgtttcaccgcctcgcgcatggcggccagatccactaccgccggcacgccggtaaagtcctgcatcaggacgcgtgccggacggtaggcgatttcccggtcggcatgggcctgttgcagccagccggccagggcgcgaatatcttcttcagttaccgagtcaccgtcctgccagcgcagcaggttctccatcagcaccttcagcgacttgggcagtcgactgatctcgcccagctgcttctccgccaacggcagactgtagtaatgccaggttttatcgttgacctgcagcgtgtccttactggcttctcgtagggttgacgacatagctcctcctttatctcagggatggcataccctgattctcctcagggtctccattaaagataacacatactgagcataacactttgataacaacccaaattgctaaatacggcgagacagagagagaggaaacgggaattatccgagagcaggcgaaatagcaccaaaatagtgcaaagagggcgtatgccgatattgtattagtacacgaggacaaaaaaagagctaatcggccagcgggcagtgattagctctggtgagtgatttcaggttggatgaatccagcggcaaaatatattctccctgtattgccggtcactgattttatattacagtttcctttcactgtcataaaaatgacatgtatctacaacgatgacctacagctttagctgacaatccagatgttgcagatggtgagcgcgatgatgctccagaacatcgccaaccctaccaacactacgccccatacgcgactacgcagaacgggatcgatttcggttttgtcattctcgtatgacatcgccagtttcatgtaatcgatattacttatcatattgtcaccaccaattgctcaaatcatcaggtacagataaatcttaattatggataaaagattaatccagtgaatttaggcctgatggaatatatttaaccggttatttgatcgcggcgggcataatgaaaaacgtgttgccaaaaattattaattttgtgattggttcgaggtttaagttgttaaatacagtccatcatagttaatggcactcctcgcagggagtgccattattattttcagggttatttttccggaagttttatatctttgaacatcgcttcaatatcttcattcgagcgtaaagccaccgcggtatctaccacgtccctggtcaaatggggagcaaaacgttgaataaaatcatacatgtagcttcgtaagaaggtgctgcggcggaaacctatcttagtggtgctgtggctgaaaataccgttcgcatccagcttcaccagatccgggtcagagaccggatccaccgccatgctggcgattacccctacccccagccccaggcgaacataggttttgatgacgtcggcatcggtggcggtaaaaacaatgcgcggcgtcaggcccgcacggttaaacgcggtatccagttcggagcggccggtaaaaccaaaggtataggttaccaatggatactgggccagttcctctatggacaccgagcccttggtggccagaggatgctcgggggtcactacaatcgaccggttccagtgatagcatggcagcatcaccagatcgtcatacagatgtagcgcctcggtggcgatggcgaaatcggcattgcctttcgacacagcctccgcaatctgagtcggcgagccctgatgcatatgcagcgacacccgcgggtagcgttcaataaaccccttgatcactcccggtaacgcatagcgcgcctgggtatgggtggtggcgacgtaaagagaccctttgtcaggccaggtatgctctccggcgacagatttgatggcatcgactttcgacagcacttcgcgggcgatgcggatgatctcctgcccggccggcgtcacctgggttaagtgtttaccgctgcgggcaaagatctgaatgcccagctcatcctccagcatccggacctgcttactgatacccggttgggaggtatagagcccttcggcggtggatgaaacattcaggttatggttaaccacctcaacgatgtagcgaagctgttgtagtttcatggctgatatccgtttgcgcgtaaaatgaagccgcttaatacactttacgttcaggcaacttgtcgccgatgaaggccctgggctcccggcagttggccatagtggcgccgcaatgcatcctgaaagcgatgatgtataagacgttttaataataaaaaaggcattaactataaccactatatcatttatatcaacactgtatagacgctaacgaaaaataatataggtggttataaggggaggaaattaacgcaaagaggggaagacgacacggcagagaaatgcactctctctgccggtcgcctgagcaggaaaagcgcgcttttcctgcccgaacgaacgccattactttttggcttccgtccacttaccgtcgataaagaaagctgaccagccggtcgctttgccctctttttcagacgccacgtactgctgcttggttttacggctaaagcgtaccagcgttttattgccttccggatcctgctgcggcgcatcggcgagataacgcagtttttccggcagacgatcgcggaagcggtacagctcctccaccagcggcgcacgcgtttcccgtgatttcgggaaggtgttggccgccaggaagacgcccgccgccccgtcgcgcagcacaaagtaggcgtcagacttctcacacggcagctccggcagcggcaccggatcttccttcggcggagccacttcgccattgcgcagaatcttacgcgtgttcttacactcgtcgttggtacaggccatgtacttaccgaaacgccccattttcaggtgcatttcagacccgcacttctcgcactccaccaccgggccgtcatagcccttgatgcggaattcgccctcttcaatctcgtagccgtcgcaggtcgggttattaccacagacgtgcagcttacgcttaggatcgataaggtagctgtccatcgccgtcccacacttctggcagcgacgtttggcgcgcagcgcgttggtttccgcgtcatcgccttccagcacgttgaggacttcgttctccggcaccaggttgatggtggttttgcaccgctctttcggcggcaaggcatagcccgaacagccgaggaaaacgccggtgctggcggtacggatccccattttacggccgcaggtcgggcagtcgatgctggtgagcaccatcgggttcggctgcatgccgccctcttccggatctttctctgccgtcgccagctgggtggtaaaatcgccgaagaagtggttcagcacctctttccactcggcctggtggttcgcaacctggtcgaggcgatcctccatctgcgcggtaaaatcgtagttcatcagatcgcggaagttttcttccagccggtcggtaacgatctcgcccattttttcggcgtaaaaacgacgattttccacccgcacgtagccgcgatcctgaatggtcgaaatgatcgacgcgtaggtcgacggacggccaatcccgcgtttttccagctctttcaccagcgaggcctcgctgaaacgcgccggcggcttggtaaagtgctgcgcaggcgtcagctccaccaggctcaggcggtcgccctgtttgaccagcggcagcgttcggtcttcatcgcccttgcgcagcgccggcatgacttttgtccagccgtcgaaacgtaaagtgcgaccgcgcgctttcagtttgaaatcacccgcagccacggtcagcgtggtggagtcgtactgcgccggcgtcatctgacaggcgacaaactggcgccagatcagctgataaagcttctgcgcatccgcttccatatctttcagcgtttccgccagcacgttcacatcagacggacgaatcgcttcgtgcgcttcctgcgagttttctttgctggcgtactggttcgcgctatccggcagatattttttgccaaatttgtcgctgatgtagccgcgaaccatgttcagcgcgtcctgactcaggttggtggagtcggtacgcatataggtgatgtgccctgcctcatagagtcgctgagccatcatcatggtctttttcacgccgaagcccagacgggtgctggccgcctgctgcagggtggaggtgatgaacggcgcgcccggcttgctgctggtcggcttatcttcacgctccagtacgctgtagctggctttttccagcagcgataccgccgccatggtctcatcgcggctgaccggacggaacggcttatcgtccttatgggtcacctgcagcggcagggcgtcaccgcccggcgtggtggtgctggcgtcgacttcccagtactcttccgggacgaacgctttaatttcacgttcacgctccaccaccaggcggaccgcgacggactgcacgcgcccggcagaaagaccacgggcgatttttttccacagcagcggcgaaaccatatagcccaccacgcggtccataaaacgacgcgcctgctgggcgttaacccgatcgatattcagttcgcccggcttttcaaaggcctgacgaatagcgtttttggtgatctcattgaacaccacgcggctgtaacgctgttcatcgccgccgatgacttcccgcaggtgccaggcaatggcttccccttcgcggtcaaggtcggttgcgagatagatgtggtcagctttttccgccaactgtttgagttctgaaactaccttttctttacccggaagtacttcatagtgcgcattccagtcatgccatgggtccacgcccatacggttaaccagagcactacgttcgtcctttttaggctttttagcccctttggtggcggtagagtcggcgctctttttggaagctgatccactggtcggcaaatcgcggatatgaccgacgctggatttcaccacgtagtcattacccagatacttattgatcgttttggcttttgccggggactcaacgataacgagagctttacccatattcacctttacctaatttgattcatccaggaatacatcgcacattcatacaccctccactggcgactgcctcatatgttgcggcaccgtcggtgaatatcaaccctgaacacccgtttcatctccgtaaaaccaggcgcttgagtttgctgactttttctcgtcaggtgacatagcacgaagaatttttggccgaatgtcaagcaaatctgttgccagatcgccgaaagcgtcacactgtacctgataaaattcgttacgcaactttattagcatgcaaaagcaaatcccgccagtaaacggctgtttctccactggttaccattacccctgatttatgcatggaaaatttgccccacgccgccgcgcggcgtaaactacgcgcggagaaaaagaggagtccgttatgcaaggtacaacccaaccaatcgatcgccagacgctgctcgaaaaagccaacaaacttattcgcgaacatgaggatacgttagccggtatcgaagccaccgacgtcgttcagcgcaacaatgtcctggtgtttagcggtgagttttaccttgatgagcagggactaccgacgccgaagagtacagcggtatttaacatgtttaagtatcttgctcacgagctgtcggacaagtaccacctggtcgattaagaccagtgaaaacaataacgcgaggcccaggcctcgcgttatgttatttacatcagcggtttctgaccgcgctgccaccagcgcagcagaagccgatcggcgctctccgccgcgctaccggtaaagcggtcgagcatcttcttacgctgttgataacgcaccccgatcacctcgtggctctccatcagccccagcagcagctcatcgctggtttcaaccgcatccaccagacctttttccagcgcctgcaccccgtaccagtgttcgccggtggccacctgctcaatatcaagtcccggacgcatccggtggacgaaatccttgaacaaatgatgtgtctcattgagatcctcgcggaacttgcgccgcccttcctcggtattttcgcccagcatggtgagcgttcgtttgtactgcccggcggtgtgcagttcgatatcgatatctttattcttcaggaagcggtgcaggttcgggatctgcgccaccacaccaatagagccgaggatcgcaaacggcgccgagacaattttgttcgccacgcaggccatcatatagccgccgctggccgccactttgtcgaccgccaccgtcagcgggatctgcttgtcgcgcaagcgctgcagctgagaggcggccagaccgtagccgtgcaccaccccgccggggctttccaggcgaatcaccacctgatcgcgcgctttcgccgccgccagtaccgcggtgatctcttcccgcaggctattgacctcatgggcatccatactgcctttgaaatccagcacccaggcgcgcggcttgccttccggctcggcattacccagcttcgcccgcgctttggccgccttcgcctcttgtttttgctttttcttctgcgccttatgccactgcttctgctgcgggccgtccagcagcgccaccgccagcgattccttcatctctttataatgctcgctaagattggtcacccgcagctcgccgcgctgcttcttgcgctgagcgaggttgacgataatagcggcaatcaccgcgatggcgacgacaaccgtcgcgatcttggctaaaaataagccgtactgagcaagtaattccacgttttcaccttgtgtaaagcactgacgttgctgcacagtgtacctcagccgctggcgagaagtctttgtgctttgtgttctctgcgcagcggattccgttttttttcgcgcggctgaaatcgttgcaagatattaattttgtgaatactttccgcttcgccgattgcaatggcgggcgctttcaggcataacagcgcaaaagtgagataccaaagatgaagcgcgatcgggaaccgatcgcccaaggagttgccgtgcattatcaaccacaacgtcacttgctgaaagatcgcatcatcctggtcaccggggccagcgacgggattggtcgtgaagcggccctgacctacgcgcgctatagcgccagcgttatcctgctgggtcgcaacgacgacaaactgcgcaccgtcgcccaggagattgagcgtgagggtggtattccccctcgctggtttaccctcgacctgctcacctgtacgccccaggcgtgccagcagctggcgcagcagatcagcatgcactatccccgccttgacggcgtgctgcataacgccggcctgctcggcgacatctgcccaatggaagagcagaagccggaggtctggcagcaggtgatgcaggtgaacgttaatggcacctttatgctgacccaggcgcttcttcctttattactccgttcggaatcgggctcgctggtcttcacctcatccagcgtcggtcgtcagggccgcgccaactggggcgcctatgccgtttccaaattcgccaccgaagggatgatgcaggtgctggccgacgagtatcaaagccgccacctgcgggtaaactgtatcaaccccggcggcactcgcaccggaatgcgcgccagcgcgttcccgacggaagatccgctgaaactgaaaacccccgctgacattatgcccgtctatctgtggctgatgggtgacgacagtcgtcgcaagacgggaatgaccttcgacgcccaaccgggacgtaaaccaggaattgcccaatgagtgatgaacgctaccgcgaacgccagcagcggctgaaagataaagttgacgcccgggtggcggcggcccaggacgagcgcggcattgtgatggtctttaccggcaacggcaaaggcaaaaccaccgccgcctttggcaccgcgacccgcgccgtcggccatggcaaaaaagtcggcgtgatccagtttatcaaggggacctggcctaacggcgagcgtaatctgctggagcctcacggcgtcgaatttcaggtgatggccaccggcttcacctggaacacccaggatcgcgacagcgacaccgccgcctgcctggcggtctgggagcatgcccgccgtatgctcgctgacgaccagctcgatctggtgctgctggacgagctgacctacatggtggcgtatgattacctgccgctggagtcggtgctgagcgccctgcgtgagcgccctgcccatcagtcggtgatcatcaccggccgcggctgtcatcgcgatattattgaactggccgataccgtcagcgaactgcgtccggtcaagcatgcatttgatgccgggattaaagcgcagatggggatagactactgagggcctgatagcgcggaaggaagtaagcgttccggcggcaagtcaccggaacgcataacattaaccgttagtcttattgcgagtactggaacgacggttgctgttgttaccctggcgcggattagcgctggtctggctgtgacgcttcaccgcccgacggatctgattggctttcaaccgccgacggtctttctcgacggcaaccttagagctggtttccggcgtgagctccaccagctcgcgcaggtagttggtctgcgccaggtccagctcggtatagccgccgcgcggcaggcctttcggcagcagaatatcgccgtagcgcacgcggatcagacggctgacctgcacgccgaccgcttcccacaggcgacgcacttcgcggttacgcccttcggtcagggtaacgttataccactggttaatcccttcgccgccggtgaatttgatggttttaaacgctgccggaccatcttctaactgtacgccgcgcgacagctggcgcagcttatcatcatccacctggccgaaaacgcgaacggcgtattcacgctcgacttcacggctcgggtgcatcaggcggttggccagttcgccatcggtggtgaacagcagcaggccgcaggtattcacgtccagacgaccaacggcaatccagcgcgcgccgcgcagtttaggcagacgatcaaacaccgtcgggcgtccttccggatcgttacgggtgcacagctcgccttccggcttatagtaagccagcacgcggcagatctgctcggcagactctttcaccgagatcagatgaccatcgatacgaatttttaaaccaggaacaatttccacacgatcgccgagggtggcgattttgccgtcgacgctgacgcggccagcttcgattttcgcttcaatttcacggcgggagccgtggccggcgcgggccagcactttttgcagtttctcgctcattgagcttccttaaggtgtcgccttcccaggcgtctggtatgctttcaaaaacaacgagttagcctaaaactcaacttaactcactgatctgtaaatatttcatggcacacagcatggcaaacaacgtaccacacaagctgtcacacaatgattcgtgggcgcacatactacacgaattttagactaaatgattcaacaagttttgtgcgcctgagtctttctgaacttagacgtataacgatgagcaatccggaacagtcaagcacagcgaacgggaaaacgctgtgtgtctattccaacagtatctacacattaaccttcgtcacggagtcgcagcattgcccgtacagcaaaagcttcgacatagtcgatagtaaatgaatcgcgccataacattcacaaaataaatattttaaaacgcagtttcatttttatgaaaaacaacttccggcacatgggtgttatttgtacaatgaattacgtatgaagattaattcacaacaagcagagggacttatgcagcaatataccaacgaaatcacacccgaaattaatgaggcccaatcacaaccgccttacgacgaagagcttttgtcactctgcgatgacaaaacccggaaagaacttgaggaaattaaaaaacagcatctaagccgcccgttagctcacattttccggtttgcagtcgttggaagtctgacccgtcgcggtggagtcattcgccatgcttcaggcggtgcgactaccggaggattacaagttgctcgggtaggtgacaaggttgtatatgctgatggcagcgagtccactattatttccggtgctggcaaggcccgaatcatgcagggcgcatccgctgcactcgttggcagtatgcttgataatggtgatgaaataatctctaccccacaatcgtgcagcaaactggtttttcgtgaaggccgcgaactcccggaaggattcttgaccgtgtcagggagtaagcactgatgggcgttaagggatactatttattcagaggtgataagacacgatgtggtggcgttatcactgaaggatggagcgaccaccagcattttgacagagatatgtcctgtgaagggcataaagtaacttgtggtaaacatccagggctttaccgtatttgtggtgggcttgatgatgacatacacggcaaaaggattgccggaacactacacagttatagctcctgcccctgtaaatccaaattcatcaattcaaactgggatgatgattacgaacttggtggagaagcaacggtaacgcacactgatctacctcacctcgtcaagatgcctgaacttccagggccgattgagtcagaaccggaacagaacgcccaaacagcaaaaaagaaaacaggtatagatgcaggttttgccgttatcacttatggcggtactacggaagcgtggcaacgcctgttattcactgaaaacccaccagcaggggcaaaagagctattctctattctgaacggcccggatgaaagatacaaagctggttcgattatgcttctggttgatccagagaaacaggacgacgagcagattgcccacatgaaagccgcgaaagcgcgagttgatgcggcgttagaaccgctgacaatccaggaagctaacttgctgcacaaacactacgcaaccatagctaatttcaccagctacgctgatacaggaattggccttgctgctgatcctgttggaaaatactttgagagtatcgaaaaaatactcagagagattcaagaaacgtataagaatacctacataacgagaggctcgttgataggagaacaattttacgttcaacgtagccagttgtttaaagagcttgaatcaatacttaaagtcagattcctgaataaggctatgaaattcggagagtatacaaaaataaaaaaagcacttggcctatccagcagttctattacccacaaatggaatgaaacggggatcagtgacattgaaggctatgctacccacatcgaacgggcagctaaatacgtaaaagcaatgcgttacactggttatttaggcattggtattagcggactgcattcactaaatgaaataaatgaggcttgttctgttggtcgcgaagctgaatgtaccaagaaaaagtatactgagattggtagctttgctgtaggtacgggggttggtgttgctggtggctatttagcaatacctctttgtatcgctatcggtgttggtactgctggtgtcggagggcttgcttgctctgtgattgctggggctggtttaggctatgtcggtagtagtgcaggtggcgcattcggtgaatggggtggagagcagctgtatgaaactttcggtaattaattttataattatgcatcgtaactcgattggattggtattgtgtctatgcctaatacttacgggggttatttcaattatttacgatcgcatttcgaaaaataaattcattactctctgttcgctatttgttgaaaaatttggcgcaagaccagtagaggctttaatttatcaggatggggggttctttttctcgtttatgcgtgatgcattttttattaaagcattatactttaaagaaaactcatttcatacgcgaggaatggataatgaacaaattcgattcattaaagaacttcctaatcagtataccgattggttacgtgtaaaagtacgattttccgtggtcggtattatttttctattcatgatgttatcagttttctatttaccatcattcatttaattgaaataaatagccaagagcaaaacttggctattttattcactcccaatcagtatcatcaattacataagaaactgaggataagggaaacgtatgcaattagcgcatagcgatccctcatattgatctttggcaaaaagtctattcagagaaaaaatgatgatgtcgattatatacgggagctacctgcaaacatcaaatactggtttatcgccgaattgttgtgttcattggtaggttttattgccctactaattggtggtatctgtctttgggtcgataaatgattatttcagcagaactgatcatctgcgggttaggaagattaagcctcatctgcggtatagctgttacggtgctctcatttatcaacaaaaagcgcttctccgcgacctgtacgctgtaaaaagaaaaacttcgtcgggaaagcttctgttcgccgcgccccgtctttagtatggaacagattttcctcattctcctgtgcccattcacgcat

SEQ ID NO: 5349 - DNA, 42880 bp, Unknown
  gut microbiota DNA sequence
gccgcgccggagagcgccttgacgccagggaacgctttgtcgatccctttcagttgcaataaggcttccatgacggcgacctcagaacgtgacgccggcacagagaatgatattcgcaaacggggaacactccccgctgcgaattaccgcctgactgtctgcggtttgttttttgaactgctcatggctggtgtaacgaatttcaatggtatttccctggtgctgctgcagctgctcgaggtgagtgagcaacgtcgcgtggagctgcggattatgggttttaatctcttccgcgatgacagccgcttcaacctgcatttccgtcgtcaccacttccagcacctgcataaatgaaggtacgccctgagtcagcgccatatcaatgcgcgtgctgctgcggggaaccggtaatccggcatcgcagaccaccagcgtatcggtgtggcccaggcgggaaatgatcgcggaaatatcagcgttaagtacgatgccttttttcattttttctcttttgctccactagcgaaacgtttcgctaaaataattattatcaatgcgtgagcagaaaaccatcaccagaagagagaaatgtgatcgccatcgaaacgtttcgcgaggcagcgacaggacataacaaccggagtgagaaacaaaaagcccttcgcaatggaagggcttttctgacatcagatttcgacctgggtaccgagctcgataacccggtttggcgggatctcaaactgatccggcgcccgcagggcgttacgctgcagcagcagataaagcttgccgcgcaggcgcagataccatggccgtttgccgataatcagcgactcatgcgacataaagaacgaggtctccatcatccggcagctgagtccttccaggccacagcggtggaacacctcttcaacgttaggcgtttcccgccagccgtagctggccaccacccgccagaaggacggtgacagctgctcaatctgcacccggcgaacgttatgcacgtaaggcgcatcttcggtacgcagggtcaggaggatcactcgctcatgcagcaccttgttgtgcttcaggttatgcagcagggcaaacgggatcacgttcagggcgcgggacatatacacagcagtacccggcacacgcactggcggtgacttctccagcgaagagatcatcgcttccagcgagttgccatgctcgtgcatccggcgcagcaggcggaaacgctcgctcttccaggtcgtcatcaccgtaaacatcaccatccccagggacaacggtagccagccgccggagacaatcttatcgaggttcgccgagaacagcggaatatcaatgcacaggaaggccaccagcatcagaccgacaaacagcttgttccagtgccagtttttgcgcgccacggtcgccgacagaatggaggtcagcaccatggtgcccgttacggcgataccatacgccgccgccaggttagacgaatgctcaaagctgacgataacgatgaccacagaaacgtacagcagccagttaatgaacggaatgtaaatctgcccggactccatttccgaggtatggataatgcgcatcggcgacagatagcccagacgcactgcctgacgggtcagggagaagaccccggaaatcactgcctgggaggcgataaccgtcgccagcgtggcgataatcagcatcgggatcagcgcccactcaggcgccagcaggaagaacgggtttttaatcgcttccgggtgcttcagcagcagcgcgccctggccaaaatagttcagcaccaacgagggcagcacgacggagaaccaggcaacgcggatcggcagtttgccgaagtggcccatatcggcgtacagcgcttccaccccggtaatcgacagcaccaccgcgccaagcgcaataaaggaaacggtcttgtattgcaggaagaagtgcacagcccagtaggggttcagcgcctgcagaacttccggattagcgtaaatgcttcgcgcgcccagcaccgccagcaacaggaaccagatcagcataatcggcgcaaacagcttgccgaccatgccagtcccgtgcttctggatcacaaacagcagggtgagcacgataatggagatagggacaatccaggtatcgagctgcggggcgataatttctaacccctctatcgccgacattaccgaaatcgccggggtaatcaccacttcgccataaaagaaactgccgccgataaggccgaggatcaccagcacggaggtcattctggccgaagtattacgtccggccagcgacatcagcgttaagatcccgccttccccggcgttatccgcccgcatcacgaaggtgatgtatttaatcgatacggtaaagattaacagccagaaaatcagcgacaaaaagccaaaaacggcatcgcgctctacgccaaagccaaactgacctgacaggcattcgcgcagggtatacagtggactggtaccgatatcgccgtacaccacgccgatggccgccagcgttaacgccggcaacgattgtttattatcagtgctcatagactagtcttttcgtttataaaacaaatgtgtgcctagtcccttggcccacaaaaagcgcacagtatgcacgattatttgtgaaatcgtacccctaacagacaccatattaacctggctcaaaaaaaataaatcgattcttcaggctattaccgccccggctctaacatctatactcgtcccaataacgatacatgacaaagcacgcaactcaattatggctcaaacacatttactggctgaaagaatttcccggctcagcgcggcactcgaaaaaggactctttgaacgcagccacgcgatacgcctctgcctgctggcggcgctcagcggcgagagcgtttttttgcttggtccaccggggatcgccaaaagcctgattgcccgccgcctcaaattcgccttccagcaggcgcgcgcttttgaatacctgatgacccgcttctccaccccggaagaggtatttgggccactgtccattcaggcgctgaaagatgaaggccgttacgaacgtttaaccgccggctacctgccggaagcggaaatcgtgtttctcgatgaaatatggaaagcaggtccggctatcctcaacaccctactgacggcgattaacgaacgtcacttccgcaatggcgcgcatgaagagaaaatcccaatgcgcctgctggtggccgcgtcgaacgaactcccggaagccgacagcagcctggaagcgctgtatgaccgaatgctgatccgtctatggcttgataaagtgcaggataaaggtaatttccgttcgatgctggtcagccagcaggatgaaaacagcaatccagtgcccagcgcgctgcaggtgagcgacgaggaatttacccaatggcagcagcagatcggcaatattaaactgccggacgcggtgtttgagctgatattccagctccgccagcagctggacgccctgccaaatgccccctacgtctcggatcgccgctggaaaaaggctattcgcctgctgcaggccagcgccttcttcagcggccgcgacagcatcgcgccgattgacctaatcctgctgaaagattgtctgtggcacaacgtcgaaagtatgaacctgatgtcgaagcagctggaaacgctcatgacctgtcacgcctggcaacagcaggcgatgctgacgcggttgggggcgattgtgcagcgacgcattcagatccaacaacagcaaagcgacaaaacggcgctgaaggtcacccgccttggcgggatgtttagccgcaaaccgcactatgaactgccggcggagatccaggggaccaccctgacgctgctgctgcagcagccgctcaaacttcacgatatggaagtgatccacattacttttgaacgcgaggcgttagccaactggctggaaaagggcggcgagatccgcggtaagctcaacgggatcggctttgctcaactactcaatatggatgtcgacaccagccagcatctggtcgtccgcgatgtgagcctgcagggctcacgcctcgcgctgcccggcagcgcagcgcaggagaatatgccggcggaaattcgccagcagctggaagcgctggatgatgagtggcaccagcaacacaaccgcttcagcgagcagcaaaagtgcctgtttatcccggtcgaatggctgggaagaatcgaagccagcctgcaggacgtcggcgcgcagattaaacaggcgaagcagccatgacgctcgatatgctgaatgtcatgctggcagtcagcgaagagggaatgatcgaggagatgctgctggcgctgttggcctctcctcaactggcggtgttctttgaaaaatttccccgcctgaaaaacatcatcgcggcggatattccgcgctggcgggaagccgttcgcgcccgcttaaaagaagttaacatcccgccggatctggacgccgaagtgcaaacctatcagcaggctcagctgctctctacctcgcagtttatcgtccagctcccgcaaattctcggcaaactgcaccagctccagtccccttttgccgcccaggcgcagaagctggtggatgacaatgccacctttaccccggcgctgcatacgctgtttttacagcgctggcgcctgagcctggtggtgcaagccaccagccttaaccagcagctgctggacgaggagcgcgaccagttgctcagtgaggtccaggaacgaatgacgctcagcggtcagctcgatccggtgctggcggaaaatgataccgccgccggacgcctgtgggatatgagcgccggcgaactcaaacgaggcgactaccagctgatcgtgcgctatggcgattttcttaaccagcaaccggagctgctgcagctggcggaacagctggggcgttcaagggaagcgaaatccgtgccgaagaaagatgcgccgatggaaaccttccgcagcctggtacgcgagccggcaacggtgcctgaacaggtcgacggcctccagcagagcgacgacattctacgcctgctgccgccggagctggcgacgcttggcatcacggagctggagtttgaattttatcgcaagctggtggagaaacagctgctcacctaccggctacacggcgatgcctggcgcgagaaaattaccgaacgcccggtaacgcggcaggattttgatgagcaaccgcgcgggccgttcattgtctgcgtcgatacgtcaggatcgatgggcggttttaacgaacagtgcgctaaggccttttgtctggccctgatgcgcatcgcgctggccgataaccgtcgctgcttcattatgctgttttccagcgaagtggtgcattacgagttgaccagcgagagcggactggagcaggcgatccgtttcctgagccagcgttttcgcggcggcaccgatctggccagctgttttcgcgccattattgaacgtttgcaaaacccgcagtgggtggatgcggatgccgtggtgatctccgactttattgcccaacggttgccggatgaggtgattgctcaagtgggggagttacagcgtaagcatcagcaccgttttcacgcggtggcgatgtcggttcacggcaaacccggcatcatgcgcatcttcgatcatatctggcgctttgacaccgggctgcgtagccgcctgctgcgacgctggcggcgctaatcgttacagcagcgcggaaacgctttcgcgaacctgcgctggccatacgccgcactgcacctgaccaatatggtcaagctgcagcaacagcatcgtcaaacgagactggccaatgccgccgccgatagtctgcggcatctcgccgcgcagcagcgcctggtgccactccagtttcaggcgatcttcatcgccggtcagcgccagctggcgctttagcgcctcggcgtcaacgcggatccccatcgaggagatctcgaacgcatcctccagcaccgggttccacaccaggatatcgccgttcaggccggcaaaaccttcagaaacctcagtactccagtcatcataatccggcgcacgcacgtcgtggcgcttgccatcagctagtttgccgccgataccaattaagaagacggcgcccagctctttggcaatagcccgctcacgacctttggcatcaagctccggatagcggctcagcagctcctggctgtgaacaaaatggatctgttccggcaggaatggcgtcaggccaaactcctggctgaccgccagctcggtggctttgatcccggcgtagatcgcctcgacggttgccttcagggtgccgacgtgacgctcttcatcccccatcacgcgctcccagtcccactggtcaacatagacggaatggataggcgtcagacggtcttcatcggggcgaagggctttcatgtgcgtgtacagcccttcgcccgcgctgaagtcgtgttgtcccagggtttgacgcttccacttcgccagcgaatgaaccacttcgaactgggcgtcgggcagtgttttcacttttacctgaaccgctttctcgcagccggacaagttatcctgcgtcccatcgcccacgcggcttaagattggcgcctggacttcaatcaggccaagcttctcttccagctgacgggaaaagtgggatttaacgaaactgatctggcgttgttttgcgatatatgcggttttcatttttatgactcctgcgtcctgttgccattgattaagcaacaaaacagggcggcaatacaataatcaatcaataaaaaggcgcatcaacttttaattcattaaaatatggcgctaaaatagtaagaaccctcaaacttcataagaaaaagatatggaaaattatcagatcgacaatctggaccgcggcattcttgatgcgctgatggccaacgcccgtaccgcctatgccgaactggccaaacagttcagcgtcagcccgggcaccattcacgtgcgcgtcgaaaagatgaagcaggcgggtatcattaccggcgcgcgcattgacgtcagccccaagcagctgggctacgacgtcggttgcttcatcggcattattttaaaaagcgccaaagactatccctccgccctcgcccgcctggaaagtctggaggaggtcaccgaggcttactacaccaccggccactacagcatctttattaaggtgatgtgtaaatccatcgatgctctgcagcaggtacttatcaacaagatccaaacaatcgatgaaattcagtccactgaaactctgatcgtgctgcagaacccgatcatgcgcaccatcaagccctgatcgctttttttaatcccacatttttccacaggtagatcccagctcgctcacagcgtacaatacgccactctgaacagttgagcgggcgatcggcgatctatggcagacattacacttatcagcggcagcaccctgggcagtgcggaatatgtagcagagcatctggcggaaaagctggaagaagccggctatagcactgaaatccagcacggtccgctggtggacgatctgcaggcgcaagggatctggttaattatctcttccacccatggcgccggcgacattcccgacaacctggttcccttctatgacgcgctgcaggagaagcaggccgatctttccgccgtgcgctttggcgctatagggatcggcagccgcgaatacgacaccttttgcggcgcgatcgataaattagaagcggcgctgaaggcctgcggggcaaaacagatcggtgagacgctgaagatcaacgtccttgaacacgaaattccggaggatccagcggaaatctggctgggatcctggaaaaatttgctctgagaattgtaaagatcgtccgatcttctgtggataaccatgcttaaaagcttggatcaaccggtagttatccaaagaataaccgtagtatggtttttgagctgtgcataacccttcattctgatcccagcttatacggaccaggatcaccgatcattcacagatagtgatcctccttaagcttttgatcttacttcgcggatccgacttatccacaaagagagtcgatcctaataagagatcacaatagaacagatctctatataaagatcttctttttaatactcaggatcccggagtctttctcgaaagacgaaagttgagtagaatccacggcccgggcttcaatccattttcataccgctttatgcgaggcagaccaccatgttttatcaggatccttttgacgtcattatcattggcgggggtcatgcaggcactgaggccgcaatggccgcagcgcgtatgggtcaacaaaccctgcttttgacacacaatatcgacacgctggggcaaatgagttgcaacccggcgattggcggcattgggaaaggacacctggtaaaagaagtggatgcgctcggcggtttgatggccaaagcgatcgatcaggcgggcattcagtttaggatactaaacgccagcaaaggaccggcagtgcgcgccacccgcgcccaggctgaccgcgtgctttatcgtcaggcagtacgtaccgcgctggagaaccagccgaacctgatgatcttccagcaggcggttgaagatctgattgtcgaaaacgatcgcgtcgtgggcgccgtcacccagatgggcctcaaattccgcgctaaagcggtggtgctgaccgtcgggaccttccttgacggcaaaatccatattggtctggacaactacagcggcggccgcgccggcgatccgccgtctatcccgctgtctcgtcgtctgcgtgaattgcctctgcgcgtaagtcgtctgaaaaccggtactccgccgcgtattgacgcgcgcaccatcgatttcagcgtgctggcgcagcagcatggcgataacccgatgccggtcttctcgttcatgggatccgcggatcagcatccgcgccaggtaccgtgctatatcacccacactaacgagaaaacccacgatgtgatccgcaataacctcgatcgcagtcctatgtacgccggagtgatcgaagggatcggacctcgctattgcccgtcgatcgaagacaaagtcatgcgctttgccgatcgcaaccagcatcagatcttcctcgagccggaaggactgacctcaaacgaaatttatccgaacggtatatccaccagcctgccctttgatgtgcaaatgcaaatcgtccgctcgatgcaggggatggagaatgcgcggatcgtccgtccaggctacgctattgagtacgatttcttcgacccgcgcgatctgaagccaacgcttgagagcaaatttattcagggtctgttcttcgccggccaaatcaacggtaccaccggttatgaagaggcggcggctcaggggctgctggccggacttaacgccgcccgcttctctgcggaaaaagagggctgggcgccgcgtcgcgatcaggcttacctcggcgtgctggtagatgacctctgcaccctgggtaccaaagaaccgtaccgcatgtttacttcccgcgctgaatatcgtctgatgctgcgcgaagacaacgccgatttgcgtttgaccgaacaggggcgcgagctgggtctggtagatgacgaacgctgggcgcgctacaacgagaagctggaaagcatcgaacgtgaacgccagcgtctgaaatccacctgggtgaatccgcaggcagagagcgccaacgaagtgaacgctcacctgaccgcgccgttgtcgcgtgaagccagcggcgaagatctgctgcgtcgtccggaaatgacctacgaacagctggttcaactctcgccattcaccccgggactggaagatcgtcaggcggctgaacaggtagagatccaggtgaagtatgagggctatatcgcgcgccagcaggatgagattgagaaacaacagcgcaatgagaataccttgctgccagcgaccctcgactaccgccaggtcactgggctgtctaacgaggtgattgccaaactgaacgaccataaaccgtcgtcgatagggcaggcgtcacgtatctccgggatcaccccggcggcgatctctattttgctggtttggctgaaaaagcaggggatgctgcgccgcagcgcctgattgcggctgcctgccgcgctgatttcccagttgcataatcagcgttcgcctttatcattcatagcccggtaagcgttagcgcctccgggctcattattttttgaaggtacttaccgtgctcaacaaactttctcgtctgctggatgaagcgggtatttcgctcaccgatcaccagaaaaatcagctggtggcttacgtcggactgctcgataagtggaacaaagcctataacctgacctccgttcgcgatccgaatgagatgctggtgcgtcatattctcgacagcatcatcgtggcgccttatctgcagggctcgcgctttatcgatgttggtacgggcccggggttgccggggatcccgttggccatcgtatgtccggagtcacatttcaccctactggacagccttggcaagcgcgtgcgcttcctgcgtcaggtgcagcacgagctgaagctggataacgtcaccccggtgcagagccgcgtggaagccttcccggccgagccgccgtttgatggcgtgataagccgcgctttcgcatcgcttaatgatatggtgagctggtgccatcatctgccggcagcgaatggtcacttctatgcgctcaaagggttagcgcaaaaagaagaaatggaaagtctgccggaagggtatgacattgtcgaggtgattgagctgcatgttcctcggttggaaggggagcggcacctggtggtgattaagccaaaatcgagttaatttttatcaaaaaatgtggaaaaaatgtggcccgcgcatgttacaaaaataaaggacgtcccccgatattaacgggccgcatttaaccttgtttttactaaggcttttcttgcagttaacttagcgtaagtgattcactgacaaaatagtcaactttgaaaatatcagggtgctaaaaatcgacaatgatgaacagcatagtgatgttaaatttttattataaatgtcaataaaaggtttttattgtatgtgaggttgttttagataatgtcctcactttttatcttgaatatcaaaagcatgaaaaatagtgttttatgtccttgattcattaaagggcgcttgaaatgtttattatgtgatctgatgcacgctttaattgccgtgtttcctcgttatttgcagttttgtatgaccgctcacagaacgctgaaatgcacggaaagttgtccgttggaaaataattaaacatttattcactattttgctacttattgtttgaaatcacggggcgtcaccgtataatttgtccgctttttgatgcttgactcttcgtcttaaaggacgttttatacgacacgcgacatacctcaaagggagcaggagtaaaaacgtgatgtcagtgtcgctcttgagtcgaaacgttgctcgcaagcttctgtttattcagttactggcagtaatggcaagtggactgctgttcagcctcaaagaccccttctggggcatttccgctgtatgcggcggtttggcagtggtcttgccaaatctgatgtttataatttttgcctggcgtcatcaggcgcatacaccagcaaaaggccgtgtggcctggaccttcgccttcggtgaagccttcaaggtgttgctgaccttcgcccttctggcggtggcgctggccgttttaaaagtggtatttttgccactgatcgtgacgtgggttttggtgctggtggtacaagttctggcgccagctgtaattaacaacaaagggtaaaggcatcatggcttcagaaaatatgacgccgcaggattacataggacaccatctgaacaaccttcagttggacctgcgtacattctcgctggtggatccgcacaaccacacagccaccttctggacgctcaacattgactccatgttcttctcggtggttctcggtctgctgttccttgccatgttccgtagcgttgctaagaaagcgaccagcggcgtaccagggaaattccaaaccttcatcgaaatgatcatcggcttcgtccatggcagcgtcaaagacatgtaccatggcaagagcaaggttatcgcgccgctggcgctgaccgtgttcgtctgggtcttcctgatgaacctgatggacctcttgcctatcgatttcttaccttggatcggtgagcacatactcggcctgcctgcactgcgcgtggttccgtctgccgacgtgaacatcaccctgtcgatggcgcttggcgtgttcatcctgattattttctacagcatcaaaatgaaaggcgttggtgggttcgttaaagaactgaccatgcagccgttcaatcactgggcgttcattcctgtcaacttaatccttgaaggggtaagcctgctgtccaaaccggtctctctcggtctgcgactgttcggcaacatgtatgccggtgagctgattttcattctgattgctggtctgttgccgtggtggtcacagtgggttctgaatgtgccttgggccattttccacatcctgattattacgctgcaagccttcatcttcatggttctgacgattgtctatctgtcgatggcatctgaagagcattgattttttaccaacactactacgttttaactgaaacaaactggagactgtcatggaaaacctgaatatggatctgctgtacatggctgccgctgtgatgatgggtctggcggcaatcggtgctgcgatcggtatcggcatcctcggaggtaaattcctggaaggcgcagcgcgtcagccggatctgatccctctgctgcgtactcagttctttatcgttatgggtctggtggatgctatcccgatgatcgctgtaggtctgggtctgtacgtgatgttcgccgtcgcgtagtaagttgttagaaacctaagccacagagttaattaaagaggtattgtgctgtgaacatgaacgcaacaatcctcggccaggccatcgcgtttgttatcttcgtatggttctgcatgaaatacgtatggccgcctttaatggctgccatcgaaaaacgccagaaagagatttctgacggtttagcttctgcagaacgcgctaagaaagatttggaccttgcacaggccaacgcgaccgaccagctgaaaaaagcgaaagcggaagcccaggtaatcattgagcaggcgaacaaacgccgctctcagattctggacgaagctaaagctgaagcagaacaggaacgcaccaaaatcgttgcacaagcgcaggctgaaattgatgctgagcgtaaacgtgcacgcgaggagctgcgtaagcaggtcgctatcctggctgttgctggcgccgagaagatcatcgaacgttccgtggatgaagctgctaacagcgacatcgtggataaacttgtcgctgaactgtaaggagggaggggctgatgtctgaatttgtaacggtagctcgcccctacgccaaagcagcttttgactttgccgtcgaacacaacagtgttgaacgctggcaggatatgctggcgtttgccgccgaagtgaccaaaaacgaccaaatggcagagcttctctccggtgctttggcgccggaaacgctctcagaagcgtttatcgctatctgcggcgagcaactcgacgaaaatggccagaacctgattaaggtgatggcggaaaataatcgtctgaaggtgctcccggacgttcttgagcaattcattcacctgcgcgcggccagtgaggccatcgcagaggtagaagtaatatctgccaaccaactgagtgatgaacagcttgccaggatcgtcagcgcgatggaaaaacgtctgtcacgcaaagttaagctgaattgcaaaatcgataagtctgttatggcaggtattatcatccgtgcgggtgatatggtcattgatggcagcgtacgcggccgtcttgagcgccttgcagacgtcttgcagtcttaaggggactggagcatgcaactgaattccaccgaaatcagcgaactgatcaagcagcgcattgctcagttcaatgttgtgagcgaagctcataacgaaggtactattgtttctgtaagtgacggtgttatccgcatccacggccttgccgaatgtatgcagggcgagatgatctccctgccgggtaaccgttacgctatcgcactgaacctggagcgcgactccgtaggtgcggtggtaatgggtccgtacgctgacctcgccgaaggcatgaaggtgaaatgtactggccgtatcctggaagttccggtaggccgtggcctgctgggccgcgtggttaacaccctgggcgcgccaattgatggtaaaggtccgctggaaaacgacggtttctccgccgttgaagcgatcgcgccgggcgtaatcgaacgtcagtccgtcgatcagccggtacagaccggttacaaatccgttgacgccatgatcccaatcggtcgtggtcagcgtgaactgatcatcggcgaccgtcagaccggtaaaactgcgctggctatcgatgccatcatcaaccagcgtgattccggcatcaagtgcgtctatgtcgctatcggtcagaaagcgtccaccatctctaacgtggtgcgtaaactggaagagcacggcgcgctggctaacaccatcgtagtggtagcgactgcatctgaatctgctgcactgcaatacctggcgccatacgctggttgcgcaatgggcgaatacttccgcgaccgcggtgaagatgcgctgatcgtttacgatgatctgtctaaacaggctgttgcttatcgccagatctccctgctgctccgtcgtccgcctggacgtgaagcgttcccgggcgacgtattctacctccactctcgtctgctggagcgtgctgcgcgtgttaacgccgaatacgttgaagccttcaccaaaggtgaagtgaaagggaaaacaggttctctgaccgcgctgccgattatcgaaacgcaggcgggtgacgtttccgcattcgttccgaccaacgtaatctctattaccgatggtcagatcttcctggaaaccaacctgtttaacgccggtattcgtcctgcggttaacccgggtatctccgtatcccgtgttggtggtgcagcgcagaccaagatcatgaagaaactgtccggtggtatccgtaccgcgctggcgcagtatcgtgaactggcggcgttctcccagtttgcatccgaccttgacgatgcaacccgcaaacagctggaccacggtcagaaagtgaccgagctgctgaaacagaaacagtatgcgccgatgtccgtcgcgcagcagtctctggttctgttcgcagcagaacgtggttacctggctgatgtagaactggcgaaaatcggtagcttcgaagccgctctgctggcttacgtcgaccgtgatcacgctccgctgatgcaagagattaaccagtccggtggctataacgacgaaatcgaaggcaagctgaaaggcatcctcgattccttcaaagcaacccagtcctggtaacgtctggcggtctgtcttagggcaggccgcaaggcattgaggagaagctcatggccggcgcaaaagagatacgtagtaagatcgcaagcgtccagaacacgcaaaagatcactaaagcgatggagatggtcgccgcttccaaaatgcgtaaatcgcaggagcgcatggcggccagccgtccttacgcagatactatgcgcaaagtgattggtcaccttgcgaacggtaatctggaatataagcacccttacctggaagaacgcgacgttaagcgcgtgggctacctggtggtgtcgaccgaccgtggtctgtgcggcggcttgaacattaacctgttcaagaaactgctggcggaaatgaaagcatggtccgataaaggcgttcagtgcgacctcgcaatgatcggctctaagggcgtttctttctttaactccgtgggcggcaacgtggttgcacaggtgaccggtatgggggataacccatccctgtccgaactgatcggcccggtaaaagtgatgttgcaggcctatgatgaaggccgtctggacaagctgtacgttgtcagcaacaaatttattaacaccatgtctcaggttccgacgatcactcagctgctgccgttaccggcatcagaagatgctgatctgaagcgtaaatcctgggattacctgtatgagcccgatccgaaagcgctgctggataccctcctgcgccgctacgtcgaatctcaggtttatcagggcgtggttgaaaacctggccagcgagcaggccgcccgtatggtggcgatgaaagccgcgaccgataatggcggcagcctgattaaagagctgcagttggtatacaacaaagctcgtcaggccagcattactcaggaactcaccgagatcgtctcgggggccgccgcggtttaaccaggttatttcgtagaggatttaagatggctactggaaagattgtccaggtaatcggcgccgtggtcgacgtcgagttccctcaggatgccgtaccacgcgtgtacgaagcccttgaggtacagaatggtaatgaagttctggtgctggaagttcagcagcagctgggcggcggtatcgtacgtaccatcgccatgggttcttctgatggtctgcgccgcggtctggatgtaaaagacctcgagcacccgatcgaagtcccggtaggtaaagcaacgctgggtcgtatcatgaacgtactgggtcaaccggttgacatgaaaggcgacatcggcgaagaagagcgttgggctatccaccgcgcggcaccgtcctatgaagagctgtccagctctcaggaactgctggaaaccggcatcaaagttatcgacctgatgtgtccgttcgccaagggcggtaaagttggtctgttcggcggtgcgggtgtaggtaaaactgtaaacatgatggagctgatccgtaacatcgcgatcgagcactccggttactctgtgtttgcgggcgtaggtgagcgtactcgtgagggtaacgacttctaccacgaaatgaccgactccaacgttatcgataaagtatccctggtgtacggccagatgaacgagccaccgggaaaccgtctgcgcgttgcgctgaccggcctgaccatggctgagaaattccgtgacgaaggtcgtgacgtactgctgttcgtcgataacatctatcgttacaccctggccggtactgaagtatccgcgctgctgggtcgtatgccttcagcggtaggttatcagccgaccctggcggaagagatgggcgttctgcaggaacgtatcacctccaccaaaaccggttctatcacctccgtacaggcggtatacgtaccggcggatgacttaactgacccatccccagccactacctttgctcacttagatgcaaccgtagtactgagccgtcagatcgcatccctgggtatctacccggccgttgacccgctggattccaccagccgtcagctggatccgctggttgttggtcaggaacactacgacaccgcgcgtggcgttcagtccatcctgcagcgttatcaggaactgaaagacattatcgccatcctcggtatggacgaactgtctgaagaagacaaactggtggtagctcgcgcgcgtaagatccagcgcttcctgtcccagccgttcttcgtggcagaagtctttaccggttctccgggcaaatacgtggcgctgaaagacaccatccgtggctttaaaggcatcatggaaggcgaatacgatcacctgccagagcaggcgttctacatggtcggttccatcgacgaagccgtggaaaaagccaaaaaactttaacgccttaatcggagggtgatatggcaatgacttaccacctggacgtcgtcagcgcagagcaacaaatgttctctggtctggtcgaaaaaatccaggtaacgggtagcgaaggtgaactgggtatttacccgggccacgcgccgctgctcaccgccattaagcctggtatgattcgcatcgttaaacagcacggtcatgaagagtttatctatctgtccggcggcattcttgaagtgcagcctggcagcgtgaccgtcctggcggataccgcaattcgcggtcaggacctcgacgaagcgcgagcgctggaagcgaaacgcaaagcggaagagcacattaagagctctcacggcgatgtggattacgctcaggcgtctgcggaactggccaaagcgatcgctaaactgcgcgttatcgagttgaccaaaaaagcgatgtaacaccggcttgaacgtaaaaagccagtctgggttccaggctggctttttttattgcccgctgctgacgagcggatgaagtgaaaacagcattcacccttaattgttattgattagttaaatgatgaggcgtaaactctttttatgtgatgtatatcacaaaaaagagcgttataaactgcacctgcgtcaggaaatcatcatgaaactgttccataaaatcatcgctaaatttagcgtcctgagcttctaagctccgcgctatctcgcccgctgacacgacgtatcgcccatcaaaacgacaacactggcgatgtgaaaccgggaaaagaaggtcacctgataggtggcctttcgttttttatggatagcatccatcactttaccgccctcccccgccagcgactggcgaatatttatccaggttcttcccgctgtgggtgctgataaacgcctgccgctgcggctttattcaggtggcgaaaaaacagcaaaagcagtgagatagttaatgattctccaccccgccctcctttttcagcgttaaactgatttgcagtggttaaaaatagcgtcataaaatggggtaaaacagtgagcctggacgttttctccacgtctcgttttatgatgaaaaatatgtagaaatttcaacgtgaaaggcttttacttttcgttctaactaccgtcaggatgagtatgtcaaatagtgcgatgagcgtggttatccttgctgcaggcaaagggacccgcatgtattccgatcttcctaaggtgctgcataccctggccgggaagccaatggtgcagcatgtcattgatgccgctaacgatttaggcgcatgtgcggtacacctggtatacggccacgggggcgatctgctgcgtcagactctgcatgaagacaacctgaactgggtgctgcaggccgagcagctcggaaccgggcacgctatgcagcaggcggcgccattcttcaatgatgatgaagacatcctgatgctctatggcgacgtgccgctgatctccgttgagacgctacagcgcctgcgcgccgcgaaaccacagggtgggattggtctgttaacggtgaagctggatgacccaaccggctatggccgcattacccgtgaaaatggccaggtgacgggcatcgttgagcacaaagatgccagcgaggcccagcgccagatccaggaaatcaacaccgggatcctgatcgccggcggagcggatctaaagcgctggctggcgaaactcaccaataacaacgctcagggcgaatactacatcaccgatatcatcgccatggcgcaccaggaaggacaccagatcgtcgcagtgcatccgcagcgcctgagcgaagtcgaaggcgtcaacaaccgcctgcagcttgcgcgcctggagcgcgtctaccaggcggagcaggcggaaaagctgctgctggcgggcgtgatgctgcgcgatccggcgcgtttcgatctgcgcggtacgctgcagcacgggcgcgatgtagagatcgatactaacgttattatggaaggcaacgtggtgctgggcgatcgagtgaaaatcggcgccggctgcgtgatcaaaaacagcaccatcggcgatgactgcgaaattagcccctacagcgtggtggaagatgcccagctgcaggcagcctgcaccatcggtccatttgcccgtctgcgcccgggcgccgaactgctggaaggcgcccacgttggtaacttcgtggaaatgaaaaaagcgcgtctcgggaaaggctccaaggcgggtcatctgacctatctgggcgatgcggagattggcgataacgtcaatatcggcgcgggcaccatcacctgcaactacgatggtgcgaacaagcataaaacgattattggcgatgatgtctttgtcggctcggatacccagctggtggccccggtcacggtaggcaacggcgtcacgatcgccgccggcaccaccgtcacgcgcaatatcgccgataacgaactggtgttgagccgcgtaccgcaggtccacaaacagggctggcagcgtccggtgaagaagaaataatttggattagcgccggggaaattttcccggcgaaccaggatgagagggtcaacatagatccccgtccgcaggcagtaccataacaataaccccactctctacaaggctcggggcgcccggaaaacgggcaaatacaggtcagcgacaacgcatggcatatcgccattatcaggaaatttaactatgtgtggaattgttggcgcagtcgcgcagcgtgatattgctgaaatccttctcgaaggtttacgtcgtctggaataccgtggctatgactctgccggtctggcagtggtcgacagcgaaggtcatatgacccgcgtgcgtcgcctgggtaaagttcagatgctggctcaggcggtagaagagcaaccgttacacggtggtaccgggatcgcccatactcgttgggcgacgcacggcgaaccgtctgagagcaatgcgcatccgcatgtttctgaacacattgtggtggtccataacgggatcatcgaaaaccatgagccgctgcgcgccctgctgcagtctcgcggctatgtcttcgtcaccgagacggataccgaagttatcgcccatctggtgcactgggagctggaacaaggcggtaccttgcgtgaagccgtcctgcgcgctatcccgcagctgcgcggcgcttacggtacggtgatcatggatacccgtgacccgggaactctgctggcggcccgctccggtagcccgctggtaattggcctggggatgggtgaaaactttatcgcctccgaccagctggcattgctgccagttacccgccgcttcatcttcctcgaagaaggcgatatcgcggaagtgactcgccgttcggtggtgatttttgataagtccgctgcgcaagtgaagcgccaggagatcgaatccaatctgcagtatgacgctggcgataaaggtatctaccgccactatatgcagaaagagattttcgagcagccgaacgcgattaagaacaccctgaccgggcgcatcagccatggcgaagtggatctcagcgaactggggccgaacgccaatgaaatgctggctcaggttgaacatattcagatagttgcctgcgggacttcctataactccgggatggtctcccgctactggttcgaagcgttagccggcgtcccgtgcgatgtggaaatcgcctccgaattccgctatcgcaagtccgcggtgcgtcgcaatagcctgatgatcaccctctcccagtccggtgaaactgccgataccctggcggcgctgcgtctgtcgaaagagctgggctatctcggctcgctggccatctgcaacgtgccgggctcgtcgctggtgcgcgagtccgatctggcgctgatgaccaaagccggaacggaaatcggcgtggcctcgaccaaagcctttaccactcagctaaccgtgctgttgatgctggtggcgaaactggcgcgactgaaaggtcaggatgcgtctatcgagcatgatatcgtgcacggccttcaggctctgccgaaccgtatcgagcagatgctctcccaggacaagcgtattgagcagctggcagagcgcttctctgataagcaccatgcgctgttccttggccgtggcgatcagtatccgatcgctatggaaggggcgctgaagctgaaagagatctcctacattcacgcggaagcctatgcggcgggcgagcttaagcacggcccactggcgctgattgatgcggaaatgccggtgatcgtggtggcgccgaacaacgaactgctggaaaaactgaaatccaacatcgaagaggttcgtgcccgcggcggtgaactatacgtcttcgccgacggtgaagccggcttcaacggtagcgataacatgcacatcattgagatgccgcatgtggaagagaccatcgcccctatcttctatacggttccgctgcagctgttggcttatcacgtcgcgctgatcaaaggcactgacgttgaccagccgcgtaacctggcgaaatcggtaacggttgagtaaagcatcctatcctgcaaagggctgccgacggcggccctttttatttgcacctgctgttttccaacgattacgtgcgtaatattttggctggcggtagatgacaaacgatcgttttacggtccgattttgccgtcataaaaagaaaattattttgtcattccacggtcatgattaaagataaccatctgagttataagcgtattatttggcgtaaaatccactctcccggcctgtcataaaactgtcataattcgtacattttactgtcacctctttgacctattttgctcaccatagcctcgaaacaatgatttacgaatcccagcaggagacattatgaacgttatgcgtaccaccgtcgcaacagttgtcgccgcgaccttatcgatgagcgctttctctgccttcgcagcagcaagcctgactggcgcaggcgcaactttccctgcgccggtgtatgccaaatgggctgatacctatcagaaagaaaccggcaataaagtgaactaccagggtattggttcctctggtggcgttaagcagattattgccaacaccgttgatttcggtgcttctgatgctccgctggctgatgacaaactgacccaggaaggtctgttccagttccccaccgtgattggcggcgtggtactggcggttaacctgcctggcgtgaaatccggcgaactggtgctggatggcaaaaccctcggtgatatctacctgggtaaaattaaaaaatgggatgacgaagcgatcgctaagctcaacccgggcctgaagctgccgtcgcagaacatcgccgtggtccgccgcgccgatggttcaggtacctccttcgttttcaccagctacctgtccaaagtgaatgaagagtggaaatcgaaaatcggcgccggctctaccgtaaactggccaaccggtctgggcggtaaaggcaacgatggtatcgccgcctttgttcagcgtctgccgggctcgattggttacgtcgaatacgcttacgctaagcaaaataacctggcctacaccaaactggtctctgccgacggcaagccggttagcccgactgaagacaacttcgctaacgccgcaaaaggcgttgactggagcaagtctttcgctcaggacctgaccaaccagaaaggcgagaatgcatggccgatcacctcaaccaccttcatcctggtgcataaggcgacgaacaagccggaacagaccgctgaagtgctgaagttcttcgactgggcgtataaaaacggcgggaaagaagcgaatgcgctggattacgcgacgctgccggaaagcgtggtagagcaggttcgcgcagcatggaaaaccaacgtcaaagacagcagcggtaaagcgctgtactaacagtagatttttgacgaagatggcgggggcgttcaggcgctgcccgccctacggttcagactgtaggcccgggagccaacgccaccgggcatttattcgaacaagttttaatacgtaaagagtaatctatggctgcaaccaagcctgcatttacccctccggggaaaaagggtgacatgattttcagtgcgctggtaaaactggctgcgctgattgtgctattgatgctgggcggcatcatcgtttccctgatcatctcttcctggccgagcattcaaaagtttggctttgcctttttgtggaccaaagagtgggatgcgcctaacgagatcttcggcgcgctggtcccgatttacggaaccctggtcacctcttttatcgcgctgctgatcgccgttccggtgagcttcggcatcgcgctgtttctgacagaattgtcccccgcctggctcaagcgtccgctgggcattgcgattgagctgctggcggcaatcccgagcatcgtgtacggcatgtggggcctgtttattttcgccccgctgtttgcgacttacttccaggagccggtcggcaacgtcctgtcgaccatcccgttcgtcggcgcgctgtttgccggcccggcgtttggtatcggtattctcgccgctggcgtcattctggccatcatgatcatcccttacatcgccgcggtcatgcgcgatgttttcgaacagaccccggtgatgatgaaagagtcggcctatggcatcggctgcaccacctgggaagttatctggcgcatcgttttaccgtttactaaaaacggggtgatcggcggggtgatgctcggtctgggccgcgcgctgggtgaaaccatggcggtcacctttatcatcggcaacacctaccagctcgacagcatctcgttgtatatgccggggaacagtattacctccgcgctggctaatgagttcgccgaagcggaaaccggcctgcacgtggcggcgctgatggaactgggcctgatcctgttcgttatcacctttatcgttctggccgcgtcgaagtttatgattatgcgcctcgcgaagaatgagggggcacgctaatggcgaccattgaattgcaaactaccgccgaactggcggagtcccgtcgcaagatgcaggccaaacgccgcatgaagaaccgtatcgctctggcgctgtcgatggcgaccatggcgtttggtttgttctggcttatctggatcctgatggcgacgataacccgcggtttcgacggcatgagtctggcgctgttcaccgaaatgacgccgccgccgaatacggcgggcggtggactggctaacgccctcgccggcagcggcctgctgatcctgtgggcaaccgtatttggtacgccgctgggtatcctcgccggaatttatctggcggaatatggccgcaagtcggtgctggcggaaatcatccgctttatcaacgacattctgctttccgcgccgtctatcgtggtgggtctgttcgtctacaccattgtggtggcgcagatgcagcacttctcgggctgggcgggcgttatcgcgctggcgctgctgcaggtgcctatcgttattcgtaccaccgaaaacatgctgaagctggtgccggatagcctgcgtgaagcggcctatgcgctggggacgccgaagtggaagatgatctcggcgatcaccctgaaagcctccgtctcagggattatgaccgggatcctgctggctatcgcccgtatcgccggggaaacggcgccgctgctgttcaccgcgctgtccaaccagttctggagcaccgacatgatgcagccgattgctaacctgccggtgaccattttcaaatttgccatgagtccgtttgcggagtggcagcaactggcatgggccggggtattgattatcaccctgtgcgtcttgctgctgaacatcctggcgcgcgttatcttcgccaagaagaaacacggttaattttttgcggcgcagcaactgctgcgctgaatgaggaagagattgagatgagtatggtgaatacagctccgggtaagatttcagttcgtaacctgaacttctactacggcaaattccatgccctgaagaacatcaacctggatatcaccaaaaaccaggtgacggcgtttatcggtccgtcaggctgtggtaaatccaccctgctgcgcacgttcaacaagatgtttgaactgtatccggagcagcgcgcggaaggtgagatcctgctggatggcgacaacattctgactaacacccaggatatcgccctgctgcgcgctaaggttggcatggtgttccagaaaccaacgccgttcccgatgtccatatacgacaatatcgccttcggcgtgcgcctgtttgaaaagctgtcccgtgccgatatggacgagcgcgtgcagtgggcgctgaccaaagccgcattatggaacgaaaccaaagataaactgcaccagagcgggtattctctttccggtggtcagcagcagcgtctgtgcattgcccgcggtatcgcgatccgcccggaagtgctgctgcttgatgagccgtgctccgcgctggacccgatctccaccggacgtatcgaagagctgatcaccgagctgaaacaggactacaccgtcgttatcgtgactcacaacatgcagcaggctgcgcgttgctccgaccatacggcatttatgtatcttggcgagctgattgagttcagcaacacggatgacctgttcactaagcccgcgaagaaacaaactgaagattatattactggccgctacggttgatttgcccttgtgctttcaggctctcaccagttgggcaatcaggagacaccatggacaacctaaatcttaacaaacatatttccggccagttcaacgctgaactggagtatatccgcacccaggtgatgaccatgggtgggctggtggaacagcagctctctgatgccatcaccgccatgcataaccaggacagcgatctggcgaaacgcgtcatcgacggcgacaagcaggtcaacatgatggaagtggctatcgatgaagcgtgcgtgcgcatcatcgctaagcgccagccgaccgccagcgacctgcgcctggtgatggcgatcatcaagactattgctgagctggaacgcattggcgacgtggcggataaaatctgccgcaccgcgctggagaagttttcccagcagcaccagccgctgctggtgagcctcgaatcgctgggccgccacacggtgcagatgctgcatgacgtactggatgcgtttgcgcgtatggatctcgacgaagcggtacgtatctatcgcgaagataagaaagtcgaccaggagtatgaaggcatcgtgcgtcagctgatgacctacatgatggaagactcgcgcactatccccagcgtcctgaccgcgctgttctgcgcgcgctccatcgagcgtatcggcgaccgctgccagaatatctgcgaatatattttctacttcgtcaaaggtcaggatttccgtcacgttggcggcgatgagctggataaactgctcgctggcaaagatccgaaagagtaataatcattctgtctaattctggtaaatggatttatcagaattagatatgttttaccccgcggcagcgagattgctgagattatcgtcacaattaacaatctgcccgtttgaattattcattttatcgcgtaacaatcagctgccactcactgagttttaacgctcaggatggtttaaacggattgtgactgcgacagcaggcaaaacctgatattgctcctgggggcgatatcaggttttttgttttatgcgggccaataatggctgaatgagggttgctaccgcgatgcgcgggcaaaacctgaagaggattatctgccaaggcagatggtcttcttcaggtttttttgtttttgtctaaccgcaaaaataacagccgccgcgacgtcaaacggtatggatacggctattagcaccggcacggaatagggttgttgtcgtgttttatttacgccaatgattatataagggaatattatgatgagaaaaaacaggatcgcttcggcgatagtcttgctggcgccactttgttattcaactaatctgctagcgagccagttgacggtggaacaacggcttgagctgctggaaaaagcgctcaaagacacgcaaaaagagctcaaaaaatatcaggaccaggaaagaaaaagagaccagatttgggcctcatggtctcctcctgcggaaggtcagaagcgcaagaccgggggggcgaccgccgggccgaaaacggcggttaaaccggatgcggtgctggttaaaaatcaacaacctgtcaccgatggcgcgccagcctacagcgcgatgacgctgaaagactttagcaagttcgtgaaagatgaaattggctttagctataacggctacttccgttccggctggggaaccgcctcgcacggctcgccaaaatcatgggcgatcggttcgcttggccgcctgggcaatgaatattccggctggttcgatctgcagctgaagcagcgggtgtttcaggaaggcgataaacgcgtcgacgccatcgtgatgctcgacgggaacgtcggccagcagtattccactggctggtttggtgacaatgccggcggcgaaaactacattcaattctcggatatgtatgttaacaccaaagggttcctgccgtttgcgccggaagccgatttctgggtcggcaaacacggggcgccaaaaattgaaatccagatgctggactggaaaacgcagagaaccgatgcggcggccggcgtagggctggaaaactggcaggtgggcgccgggaaattcgatatcgcgttgattcgcgaagatgtcgatgattatgaccgttctttaagcaataagcagcaaattaacaccaacaccctggacgttcgctacaaagagattccgctgtgggataaagccagcctgatggttagcggacgctatgtcgccgccaaccaaagttcatcagagaaatataaagagggcaatgaaggttattatccgtggaaagatacctggatggctggtacctcgttaacgcagaaatttgctaacggcggctttaacgaattctctttcttactggccaataactctattgccagcagcttctcacgctatgccggatccagcccctataccacctttaatggccgctattatggcgatcataccaatggcaccgccgtgcgcttaacctcgcagggggaaacctatttacgcgatgacgttattatggcgaatgccatcgtctactcttttggtaacgacgtctatagctacgaaaccggagcccactccgattttgaatctatccgtacggttctgcgaccggcttatatctgggataaatataaccagaccggcgtcgagctggggtacttcaaacagcaaaacaaagatgttaccggcaagaaatataacgagtccggctacaagaccacgctgttccataccttcaaagtcaataccagtatgctgacctcgcgcccggaaattcgtttctatgccacctatattaaagcgaaggatattgacctggataaggccgcgaataataccaccagcatttttgaagacgggaagaacgatcagtttgccgtgggggcgcaggcggaaatctggtggtaagacgataactgaacggacacaacgaaagaggaacaacgatgaaacgacatgcaatttatttcgccctggcgctggcgggcgcggcgtttaccctccaggcggcgccattacccgcgatgtcggacccaagcctgccggtgagccactttatcacccaggttaacggggataaaagtatcacttaccgcttgtttgcccctgatgcccggcgggtctcgatagtgactggcgccacgccggactcctttgtctcgcacgacatgaccaaagcagcggacggagtctggacatggaaaagcgagccgatgaagcccaatctctatgaatactatttcgatgtggatggcttccgctcggtagataccggcagccgctatcagaagccgcagcgccaggtgaacaccagtttgattctggtgccgggcagtattcttgacgatcgggaggttgcgcatggcgatctgcgcaccctcacctatcactcgaaggctctgaacgccgaacgtcgtctctatgtctggacgccgccgggctatagcggaaccggcgatcctctgccggtgctctatttctatcatggctttggcgacagcggcctgtcggccatcgatcaggggcggatcccgcaaatcatggataacctgctggcggagggcaagattaagccgatgctggtggtggtcccggataccgaaaccgatatcccggaagcggtcgcggaaaacttcccgccgcaggagcggcgcaaaaccttctatccacttaatgcgcaggcggcggataaagagctcatgcaggatattattccgctgatcgatgcccgatttaacgtgcgtaaagatgccgacggtcgggcgctggcgggcctctcgcagggcggttatcaggcgctggtttccggaatgaatcatctggagagctttggctggctcgccacctttagcggcgttacgactaccacggtgccgaatgccggcgtggaagcgcagctgaagcagcctgacgcgatcaataagcagctgcgtaactttaccgtggtcgtcggggaaaaagattctgtgaccggtaaagacattgctggtctgaaaagcgagctggaaaaacagcagattaaatttgattaccaccagtatcccggcctgaaccatgaaatggacgtctggcgcccggcctacgccgagtttgtgcaaaaactgtttaaataacctttagggggccttcagcccccgttttgtgcttgtgaaggacgacaagatgaaaatgattgtgaccgaagattatgaagagatgagcctggtcgccagccatcatgttctgggctatatcacggcgccgcggcgggtgaatctggcggtgacggcggggagcacgccaaagcggatgtatgagcatttgaccgccgccgtgaaaggcaaagcattctatgatcgggtgcactattacaacttcgatgagatcccttttcgcggccagtcgcgagaaggcgtcacgatatctaatttgcgccagctgttttttaccccggcgcagatcaaagaagagaacattcacaagctgacgctggacaacgccgctcagcacgatcgccagctggaagaggctggcggtctggatctgatggtgctggggctgggggccgacggccatttttgcggcaacctgccgaataccacccgctttcatgatcagacggtcgaagtgccgattcatggggaaatgattgctcttatcgctaacagcgagatgggcggggatatctcggcagtaccagacagctatgtcaccatggggccgagaagcgtgatggcggcgaaaaatttattgctaattgtcagcggtgcggcaaaagcgcacgcgttaaagcaagtggtggaaggtccggtcagcgtgcaggtgccggcttcagtgctcaaattgcacccttcactggtgattattgccgataaagcggcggcggcggaattgcagcaataaaaagccgctagttctattccccgcttacgcagacgcatagcgggggggcatcgatgccaacgcgccgctcaccaggcccttaacgcgtgatatcccagccgcgcgcctgccacaatgccggcagctctgccagatcggtaaaggtcgtcactttgggatgatcgatcggctggttgtgcggatcggcgcagaaataaaacacttccatgccggcggcaatccccgactgagcgccggcgctggagtcatccaccagaatacagttttcggcttttacctgcatggcctctgccgcatgaaacatcagcgccgggtcgggcttccagcgctgaatatcgtagccgctgtacaagcggtcagtgaaatggcgcagcaggccggtgcgtccgagcgagtgctgcatcttactgaccgggccattggaaaccacgcacatcgggacgcttaccgcatccagcagcgcctgggctccgggaatcacctccagctcgctatcgaacaggcgagcgacctccgcccggtaaatcggctccagggtggccttttgcagattaacgccatactcagcgttgatggtgtcgataatttcgtacagcttcacacctttgaagcgcttaaaaatctcggcgaggtccagcgtaatgccgaattcctgaaacatgtgaacgtaggcgcgggagcaaatcacctcgctgtcgaccagcgtgccgtcacagtcaaaaaatactgcttctggttgagtcatagcctttccatattaacaagtttaacgttttcgtaatgctcaatgccgcgacgcaatcgttgccgtataagcaaaataaatgaaaaaaattaccatacaaccgcgcctggtgccgtaatttggtataggatagcctcgaattttccctccttacgttcggaaaccgataatgagtcaacaacaaaccagccagtcttctggccagggtctgctggagcgcgtatttaagctgcgcgagcacggcaccacggtgcgcaccgaagccatcgccggtttcaccacgttcctgacgatggtgtatatcgtttttgttaacccacaaattcttggcgtagcgggcatggataccagcgccgtgtttgtgaccacctgtctgattgccgctttcggcagtatcctgatgggtctgttcgcgaacctgccggtcgccctggcgccggcgatgggcctgaacgcctttttcgcctttgtggtggtgcaggcgatggggctgccgtggcaggtgggcatgggcgccatcttctggggcgccgtgggcctgctgctgctgaccatcttccgcgtacgttactggatgatcgccaatattccgcttagcctgcgtgtaggtattaccagcggtatcggcctgtttatcggcatgatgggcctgaaaaacgccggggtgattgtcgccaatccggaaacgctggtcagcattggtcatttgacttcccacagcgtactgctgggcgtgctgggcttctttatcatcgcgattctggcgtcgcgcaacattcacgccgcggtactggtctctatcgttgtgaccaccctgctggggtggatgctgggcgacgtgcattacaccgggatcgtctcggcgccgccgagcgtggcttcggtgattggtcaggtcgatctggcgggctccctgaacctgggcctggccggcgtgatcttctcctttatgctggtcaacctgtttgactcctccgggacgctgattggcgtgacggataaagcgggtctcgcggatgccaacggtaaattcccgcgcatgaagcaagcgctgtttgtcgatagcgtctcgtcggtggcgggctccttcatcggtacctcgtcggtgacggcctatatcgaatcttcttccggcgtttccgtgggcgggcgtaccggcctgaccgccgttgtcgttggtatcctgttcttgctggttattttcctctctccgctggcggggatggttcctggctatgccgccgcgggcgcgctgatatacgttggcgtgctgatgacctccagcctcgcgcgcgtgaagtggagcgacctgaccgaggcggtgcctgcgttcatcaccgcagtgatgatgccgtttagcttctcgatcaccgaaggtatcgccctgggctttatctcttactgcgtgatgaagatcggtaccggccggctgcgcgagctcagcccgtgtgtgattatcgtttcgctgctgttcgtgctgaaaattgtctttatcgatgcacattaatccgcacgcatgatgaaaaagcccggcatcgctgccgggctttttttatgctttaacccgccgaatatagtcgccaaaggcggtcagttggccgcgcagatggtcgagtgtgctttgatcgaccacttcacccgcctgcggatccactttgttctggatgacgccgcccataaattccggtttattcattaccatcgcatcaaggaagaccagaatctgccgcagatgatactggcagcgcgcaccgccgatggcgcccattgagctggtctgaatcagtaccggtttgccggacagcggctgctcgggcaggcgtgacagccagtcgatggcgtttttcaggccgccaggcacggaatagttatattctggagtgactatcactaccccatccgcctcgcggatctgttgcgcaatctcctgcacgcgctgcggaaaaccttcttcctcctgcatatcagcatcgtacagcgggatatcaccgatcgacggcagcgcggagatatccatgcccgctggcgcgatgccgggcagggtgcgcgcgaccattccattaaacgaccctttacgcaggctgccgagtaacgtaaccactttcaaggtatctgacatgattgctcctttggatcatgatgccggcaagaccggtcaattgagggataaggttttttccatgggtaagctggtaaagcgcatcaggcgggctgacggttcgcgtgcgcgctgctgcgcatccgccaggctgcgccagtcacctcccttagcatcatattcccagaccttcagcgagccgatgttcggggttgcggcaatggaccataccagcagcgattcggcgtcacataccgcttcgattggctgactgccggcggtgcgcaggcggccagagccgggcagcagctgcagctgcgttgatgcttcgccggtcagctttagcacgctgcgacgcagcgctaccagctggctgcgcgcttcgtccggatcatgctgtatgttaatccacagattctcattgttgctgaaattgtgccggtcggcgtcgtggctgcggacagtgcgctgcagttccatgtcgaggccacaatccccctcggtggtgagggcaacaccaacgatattgccagtataagcgatcgaaaagcggggcagttggcgatcgctaaaaaccggtcggccattcgcttcgttgatgatttcaggcagctcgctgatgccgtaaagcataaacagcagctcggcaagcagcgagcgcgacgcgcaaaagcgagcctggcgatatgtcgggagaagacgtgcggattgatgacaggccgctgacaaacgtgtcgatagcggctccccggtactgagtatccctcttgcaaaatgcgttgccatacgtcgctccgtgagtaatggtctggataaaactgcgggcgctattatcgcctggtattaacaggttttaatgccgaaatcccccattgaaaagggaatttgtttgaattttacaaattcttgcgcaaataaggtgctatgggcacgaaacaaggcttaaagcgtaccggaatagagcgctttcagcgtatctctaagccagacaagcttcgggttgtagctgttgcgcttatgccatagcagggtgaagggaacgcgcagcttttccaggtgctgcgcctccagggggagcggccgggagacgagcggcagctggtgctgctgattatagtgctgacagtagcgcggcgcggtggccagcatggtgtgctgcggctgagcggccataaaaagtgattgctcaaaccccggcacggtcagcgccacgttacgcttataccccagctcctgcagcacgtcgtccagggcccaggtatcgcgttgttcccagcagatagtgatatgcggatagcgtaagaatgccgccagatcccactcttccctgagcgccggatgatcggcgcgcagccagacctgcggcaggtcggtgaacagcacctcaaaatcgatataccacggcagcaggctcagcagctcacgcgactgcggatggctttcgcgtccgcagaagccgatatccacctcaccgcggatgatggcgtccagggagtcgtagtcccagttgcgcaaacgaatcaatgcctgcggatagcgctgatagatgcgctgagagagggtgttaaacaggatcatcagcagcggcgcttccgccgccagttcgaatttgaggccgctgggcatggtatggtgcggtttatcgaggatttggttgcccatctgcatccagtccgccagatcctgctccatgctgctgaccagcggcgtgggcgccaggcccagcggggttttcacaaacagcggatcgtcaaaccaggcgcgcagtttggccagcgacttgctcaccgctgacggcgaaacgttcatccgcttcgccgtacgggtaacgctgagctcctgggtcaggagctgcaggcagaggagtaaattaagatcaagactcgacagcggcttcttcatcgtattgcgcaacccgcggcggggtgacgaccagtaacaaaacaaggctcactatgctacaggcaatgagtatcccgatcagcatattcattgcgctgagtccgatgatggcggcgagccaaatccacagcgatgaaccgcacacctgcgcgatgccgaggaccgagctggcgacgcccgcgcgcagcgtgaacggccccagcgcctggctcatcgcgacgccgaacccaacggagaagccggcgcaaatcatgcccagcccgatcagggtgacggcctggcgagtggcgaggctcagcgtcacgcctgccgccagaaacagcacctgtgaggtcagcattaaggtgcgggggttaaacagcgacagggcgaacggcgttgagaaggagaccgccatgctgatcatcgccatcagagccatcgccattgagtaagttccccggtcgaaccccatctcttccatcattagtaccggcgagacgttaacgtaggtcaggatcaccgtcacgctgagggtggtaatgagtaagcggctgaggaaaaagcggttcaacagcgattcgccagcgtcatgctgcggtgacgctgcctgcggaggcgccgtcggccgcgtttcacgcaggataaagaccgacagcacagcgaccatgacgcccatgccggtcatcgtgtagaacaggctctgccacggatatttcagcataatcaggtggccaagcaccggcgccaggacggggataatgcaggtgatgccgttgagcaacgacagcaccttggcgcggcgacggtcgtccagcgtatcgcgcaggatagcgaaagccaccacgtagcagctgccggcgccgatcccctggataaagcgtccgatgaggaagtggctgctggtatgcgcctgggcgcagagcagggaggcgataacaaagatcgctgcacctacaatagcgacaggcttacgccccgagcggtcggcgatgcggccagcaaacagcatcgcggaggccataccggccagatagaccgagaaggcgatatgtaattgcgcctcgctggcccccaggtcctgagcaatacgcggcaggccgaccagatacatatcgatgccggaggggtagagcagaaccagggcaaagctgcagagaagaaagcgtgtcatgggatcctcgcgatgtgaatggcgttcagcatagtgaggaacgcgccgtaagacgagttgccatttggacaacgctcttttcctggcaggaaatgcgagctaacgactgcgggttcgccagacgcgggccatcccctcgctctccgggcgaacgctttcgaagccgaacttcgcgtacagttccggcacatccgccaccagcgtaacgtaggcgccatcaaaggcgttagcgtccagccaggcgaccagcttctccatcaccagccggccaaggccttttccctggtgagccggatcgacggcgacgtcgacaatatcgaaattaatcgcgccgtcgccgacgatgcgtcccatcgcgatcggcgtctcctgccagaggatatgtacgccataacagctatgcggcagtccggctctggcgccttccagggggcgcggcgacatgccggcggctacccgcaggtggcaaaacgcttcggcggagggcaccttctcgatcacggtatattcaacggtcatgttttagtctcgcggcagagggggagataaaagtagagaacgttgcgccgcaaagggcaagaaaaaacccgcattaacgcggcgttaatacgggttagtgaacgttcacggacgaggggggactaaaacttacttgccgatacagaagctggagaagatgcggcccagcagatcgtcggaagtgaactccccggtgatctcgctcagcgcctgctgcgcgaggcgcagctcttccgccagcagctcgccggcccaggcgcccagcagctgggctttgccttgctgcaggtggttcgccgcctcttccagggcctgcaggtgacggcggcgggcgaggaagccgccttccatattggtatcgaagcccatgctctgcttgaggtggttacgtagcacctccacgccgtcgccggtacgtgccgacaggcgaataagtgagtggccatttacttcgctgataccgagcgcttcgccggtgacatcggctttattgcgcaccacggtaatcggcaatttagcgggcaggcgctcgataaagtctggccagatctccgccgggtcaacggcgccggtggtggtgccatcgaccataaacagcacccgatcggcctgggcaatctcctgccaggcgcgctcgatgccgatacgttccacttcgtcattagcatcgcgcaggcctgcggtatcgatgatatgcagcggcatgccgtcgatatggatatgctcgcgtagcacgtcgcgggtggtaccggcgatatcggtgacgatcgccgcttcgcggcccgccagggcgttcagcaggcttgatttaccggcatttggccgcccggcgatcaccactttcatcccttcgcgcagcaggctgccctgacgagcttccgcgcggacggcgtcgagatcggccatcacctcgttcagctgggcttcaattttgccgtcggaaaggaaatcgatttcttcatccgggaagtcaatggccgcttccacgtagatgcgcaggtgagtgagcgcttccacaagatgattcacccgcgcggagaacgccccctgcagcgaattcagcgccgagcgcgccgcctgctctgaactggcgtcgataaggtcggcgatggcctctgcctgcgccagatcgagcttgtcgttgaggaacgcgcgctcggaaaactcacccggcctggcgatgcgcaggcccggcagggtcagaatacgtttaagcagcaggtcgagaatgaccgggccgccgtggccctgcagctcaagcacatcttccccggtaaaggagttcggcccggggaaccacagcgcaatcccctgatccagcggggtaccgtcaacgtcgttgaacggcaggtagtcggcatagcgcggcttcggcagcttgcccagcaccgcctgcgcgacgtcgcgcgccttaaggccggagatacgcaggatgcccacacccccgcgtcccggaggggttgcctgggcgacgatagtgtcgttatggctcatggtgactctctatgtagatgtaaaaaaggcggtccattgaccgccttctctggcattaacgctaccgtagatactcgaaataattcaagttgcagaaaggcggcaagttagtgaggccccaggagcttactgtagtaagtgactggggcgaactaatgaagccaacgcatctgcggcttgaagaatgaagagtatcaggatttcttcttctcgcggctatgcaggccacgtttctccagaccacggtaaatcagctgctgctgaataatggtgaccaggttgctgacgatgtagtacaccaccaggccagacgggaaccacaggaagaacaccgtgaagatgaccggcataaaggtcatgatcttctgctgcatcgggtcggtcacggtggtcggcgacatcttctggatgaagaacatggtcgcgcccatgatgatcggcaggatgtagtacgggtcctgagcagacaggtcgtggatccacaggataaacggcgcatgacgcagttcaaccgaggcgctcagcatgtaatacagcgcaaggaagatcggcatctgaataatcagcgggaagcagccgcccagcgggtttactttttccgctttatacagcgccatcatctcctggctttgacgttgtttatcgtcgcccagacgctcacgcatggcctgaatcttcggctgcagcatgcgcatcttcgccatggaggtgtactgcgctttggtcagcgggtacatgatgccacgaacgataaaggtgataacgatgatcgagaagccccagttgccgaggaagctgtggatgaatttcagcagcttgaacagcggttgggagatgaaccacagccagccgtagtcgacggtcagatccaggtgcggcgcaacggcagccattttgtcctgaatagccgggccgacccacagcgtgctctgcagtttgtcggtctggcctggctgcaccagtaccggctgcgatttgtagccaatagcgacaacgccgttgccgaggttggcggtgtagaagttattcgtcccgttattccgcggcacccatgcggtggtgaagtactgctgcagcatggcaacccaaccgtttttggtgctgacgttcaggttttcgttatccagaatggtatcgaatttatatttctcgtatttcgaatccgcagtggagaacgcggcgccacggaaagtatgcatcgtggacaggccaccggtctgcgtatcgcgactggtcggcagcgcagcggtctgcttcagctgaccgaaggttgagacttccagaggcttctcgctggcattctgcacgctgtaacccacgttcaccgcatagccaccgcgcttcagggtgaaggttttggtgaagacgttgccggctttgtcagtgtaggtcagcgggataacgagctcatcctggccatcggccagcacaaacgcctctttatcgacgttgtacagcggacgcgggccgtttgccgggttatccgggccgtcacggccggttaagccgctctgcgcctggtagacaaactgcggcgtggtttccagtaactggaacggttcggtcgatttcagcgtttttggatacgccagaagcagcgcctgctcaatatcgccaccgttggtgttgatagtcagctcaagcacgtcggttttaaccgtaatcagtttcccctggccactggccggtacgccctggtcggcggcgctacccgctgctgtggtcgtagtctgcgtggtctgctgctggggctgcggatttttgtcctgctcccaggcttgccagatcatgaaagacacgaacaacaaagcgatgataagaagattgcgttgcgaatccatcgttagtgttctctggtatcaaatggtccaggcgggacgggatcgtcaccaccagggtgtaaagggtggcattttaatacgcgtttcatcgtcaaccaactgccttttatcactccaaacctgcgtaaggcctcaattccgtattgagaacaggttggggtgaaacgacaatgcggcccgagtagcggactaatcaggcgctgataaactcgaatcaggccgatcaggacccgcgagccaggcgacaatggcggcgccataatttttccaacgcttccgagagagcacggttatcgaggtcggcaacccctcttttcgccaccaccacgaaatccattggcgggagttcatgttgacgcaaacgaaaactttcacgcgtcagacgtttaatccgattgcgttcatgtgcgcgtttcacgtttttcttggcgacggtgagaccgatgcggggatgccccagcgaattcaggcggccgaggatggtgatttgcggcgtgccagcccgttgtggctgctggaagacgaaagtgaaatgactgggagttaacaagcgtaactccctgggaaatgcgagcttaaccacgcagggttagctttattacttggaaacggtcagacgagcgcggcctttagcacgacgacgtgccagaacctgacgaccatttttagtagccatacgagcacggaagccgtgagaacggttgcgcttcagtacagacggttgaaaagtgcgtttcatggcgatttctacctaaacttgaataaattcactgacttttgcgtagacccgaacgaacttcgaacgacttacgcctcagcgtgggtgattaaagaggccggattgtaataattgtacactccggagtcaattctctttccttatttctcgcacctcgtcgcacaaaaaataagctgagacgcgtgacgaaaacgggcattacgcgccgggtgggggattatacggcctggccagtaaagcgcaaggatccacaaggatctttattagatcgtttccgcccaaaagcggcatagctcattaatttttccaatatgcggcggaaatcgtgcttcactccccgcaggatcgattacacttacccggtttcgatccttcctgtggataaatcgggaagaatctgttgagaaacacaagatctctttctcagtttaggctatgatccccggtcccgatcgcgatccccggatccgcagcgggtaataaccgcagatagcggttcgcacgtcaccccttttgtgcaggggcttttcggctaatgcagggtcttgtcgacgtgtgccaacaatcacgattgtttcagtttttctttgatatcgattttatgttcgagtggagtccgccgtgtcactttcgctttggcagcagtgtcttgcccgattgcaggatgagttaccagccacagaattcagcatgtggatccgcccattgcaggcggaactgagcgataacacgctggcactgtatgcgccaaaccgttttgtgctcgactgggtaagggacaaatacctcaataatatcaatggactcctcaatgatttttgcggtgcggacgccccgcagctgcgttttgaggtgggcgctaagcccgccagctcgctgcagaaaggggcggtaagcccggct

SEQ ID NO: 5350 - DNA, 165028 bp, Unknown
  gut microbiota DNA sequence
ccctgcgcagcgcgcagggtcagcctgaatacgcgtttaatgaccagcacagtcgtgatggcaaggtcagaatagcgctgaggtctgcctcgtgaagaaggtgttgctgactcataccaggcctgaatcgccccatcatccagccagaaagtgagggagccacggttgatgagagctttgttgtaggtggaccagttggtgattttgaacttttgctttgccacggaacggtctgcgttgtcgggaagatgcgtgatctgatccttcaactcagcaaaagttcgatttattcaacaaagccaatgcccggacggatatccctcatccgccgtgtgttcggctggatttattacctgccgcttcagggaaaggaaatatctcccctgcccgcgagagtttcgaagtcagatgatattttttggtcaagggatgtttatcataaagcgaaagagtcagggggaggtaacgcctggccctaaataatatctgaattcaacccaaggtagctttattgctctcggtcatcacatgtagaaggaatattccataagcgacccttttataatttccctgttgaatattaattagcgaattaatccctccgtcaggaatatttatatttaccttaaatataaataataataaaaatatcaccgcaatcgatataccctcagtagcgctgagtccagaatctcccccggcaactgccagatacccggaggagcgccccacccggccattgccaggcgctgcattaccccgtattttggtttcccgctccgctgtgggcgggtgtcagggcgaacgagagagagaaaatgaaaccactatttgtctatgggacgctctgtcccggtcgcagcaatgcgcatattctggaggcgatcgggggcgagtggcgtcccggctacgtcaccggcaccttttacgcgcgcggctggggcgcagccgccgatttcccggggatcgtcctcgacgctcacggcccacgggtcaacggctatctgttcctgtccgatcggctggcggcgcactggccgatgctggacgactttgaggaggggtacgatcgggtgccggtggaagtgaccaccgacgatggacagcagatcagcgcctggatttatcagcttcagccccgggggtaatcccccgccgcgctgcgcggcatggtacagcagcccagcgcgatcgcgagtctggcgtcgtttctgccaatgcaggtatacttgccagatgtttcctcagtttcagacacgcagatgacaaaactcaccttacaagagcagatgctcaaagccggcctggtcagcagcaaaaaaatggctaaagtccagaggacggcgaaaaaatcccgcgttcaggcccgtgaggcccgggaagcggtggaagaaaataaaaaagcccagctggagcgtgataaacagcttagcgagcagcaaaagcaggcggtgctggcgaaagagtataaagcccaggtaaagcagctgatcgagatgaaccgcattacggtcgcccggggcgatatcggctttaactttaccgataataatctgatcaaaaaaatcatggtcgacaagcccacccagacccagctgattaacggccgtctggcgattgcccgcctggcggtggataacaagcccgaaggtgaatatgcgattattccggcggtggtggctgagaaaattgcccagcgcgacgccagcagtatcgtgttgcacagcgccctgagtcaggatgagcaggatgaagacgatccgtacgccgactttaaggtacccgacgatctgatgtggtaaccccgggctttcccgccgcgggcgatcaaaacgggctcgcctgctggatatgcatcggctcatggctgacggggtggacaaagcgcagttcgctggcgtgcagcatcagccgcgaagcgcattccgtgccgggcagctcccggccaccgtacagatcgcagccaaggatcggatagcccagcagctggcagtgaatacgcagctgatgggtccgtccggtctccggggtgagcgccacccgggttaacgccagcgccctctcgccttctcgcgcctgatacaggcggtctatgacccgatagcgcgaacgcgccggtttgccgtggcgggcgcagagcgccatgcgcgggaaacgggccggatctttggcgattgccgcctccactatcccctcatcttccgccagatggccgcacagcagcgccgtatagaccttgtccaccgtgcgctggctgaactgctggcacagcaaggcgttaatgcccttgttgcgggcgatcaccatcaggccggaggtgccgaagtccaggcggtgcaccagggtgcagcccggaaagcgctgtaccagccgatgatgcacggagtcgaggttgcgcggatctttgcccgacaggctcagcagcccggcgggcttattgatcagcaccaggtgttcgtcctgatacaagagggtgatctgttcgcgacacggcggcgcgacaaaggtatcgataatggtggacatcaggcggcccgaagaaggagtggctggcgatagtaccccattttgcccagcggcacgatgctggcgcacaatccgccctcgcggcggcgtcatttatcacccacacttatcgcaaaggcatggcctgtacaggcaatgtgctttacactgcgcgctgcaaaatttgtgttaaccaacgagtaatacggtaatggcgatgaacggaacaatcacaacgtggtttaaagataaaggttttggatttatcaaagatgaaaacggcgaaaatcgttattttcacgtgattaaggtcgccaatcctgatcttatcaagaaagacgcggcggtgactttcgaacctaccaccaacaataaagggctgtcggcctacgcggtgaaggtcattccggaaagcaaatatatctatattgccggcgagcggttgaagctgacctccatcaaatcctatgtggtgtaccgggaagaagagccggtcgagacccgcgtcgataaagaaaacgccgtgctgtcggtcgggctgctgatgaacagcatccggccaaaagccacggtgcagccgggagagatgcgctcggtgaaaaagctggcgatcaccacctttcaggggacaaccctgatcttttcggaagacgaaatcgatatcgatgccacggtaaaactgcttaaggtgtaagccctggcgcgcggtttcccgcgcgcccgaagtcctgcccgatatgctacccgccatcgcccctcgccggacggggcgatggcgccagacagccgataaggatgccgccatgcccgtaaattttgacttcaacgatctctacgcctttcgcgccctgatggaatatggcagttttcggctggcggccgaatccatctgcctgtcgcagtcggcccttagccgacgcatcgaaaagctggagacggcgctgggcaaccggctgttcgatcgcaccacccgacgggtgaccctcacgctgtatgggcaaaattttgccgaacgttcggagcagctgctggcccatgtcgagacggtgctggcggatatcagccaggtcagcaaggcgcgcaccgggctggtgacggtggcgacagtgccctccgccgcctactactttatgccggaaatcatccgcagctttcaggcgcgttatccccaggtgcgcatccggttgattgacagcagcgtcgggaatgtgatcgaggcggtcagcagcggacaggctgactttggcctctgctttgccaaaaacctgccagccagtatcgaattcacccctcttgccgacgaccgctatgtggccgcctgtcggcacgatcatccgctggcgcgcaagacgcacctaagctggcaggcttattttgaacaggattatattggcctggatcgggtctccggcaaccggacgctgcttgaccgggagctggcgcatctgacgccggcgcggccaagtatctgcgaaacccgccacgtcaccacgatgctggggatggtggaagcgggcatcggcattgccgccgtgcccgcgatgtcgatgcccgccggggagcattccgttctccgcgctgtgccgctcaccgacccggtggtcacgcgtacggtaggcctgatccgcctcagcggccgtattcagtcctacgtggcggcagagctggagaagctgattattgaacagtatccttctggctgaccggcacggcggcggctacgcttcgcataccggtggcgtggatggtctcctgcgccgccggtgacgccagatacgtcagcagcgccttgccttcctgcgggtggtcggcgctgatggtcaccgccccggcaaagcgggtgatgtactgcaggttatccggcagttcgccgacgaaggttacgccgggcaccggcagcagttcgctcacctgctgaaaaccgatcgcataccgtcccttggccacttccgaggccaccggaatgcgctccaccatctgcgctttactctgcatcgcgtcatcaatgcccagggtgtggaacagcgtcgagctgacatagcgtccgctggcgctgtcggagtacgcgaccgatggcgccgccagcagcgtcgcccgcagctggtctgcgttgtggatagccggcagcggcgcccccgccttcaccaccacgccgatcggcgagtcggccagctcccggcgcgaatccggttgcgtacggcccgctttctcgaggctggtcagcgcgtccccgaccatgatcaccacgtccgcgtgttcgccgcgcgccagacggttagggatcgcctgcggcgtttttcccatcgacgggccagggatcaccacgaggtggttgccggtttgtttttcccacgccggggccagcttttccagcgccgctttgaagccgccggagatcatcacggtgacctcagcggacaacgcgctgccgccggtggcggccagcagcagcgtggctagcagggttcctgtcgttttacgcatcatcttctccctgattaacgtgccgtctgcagcgcaacggcgctacggcgatagaggtagcaagtggccagcagaccgcagatggcggcaaagctcatccagtagccgggagacgctttatcaccggtatactcaatcagcgccgtggaaatcaccggcgtgaagccgccaaacaccgcggtcgccaggctgtaggccagcgagaaacctgccacgcgcacttcggcgggcataatttcggtcagcgccgggatcatcgccccgttgtacatgccgtagataaacgacagccacagcagcacgctcagcatcatcaaaaagctcggggcgttcgccagcatggtcagcgcaggccaggcggtagccagcgccagcagggtcatggcgatcagcaccgaccggcggccaaagcggtcggacagcgccccgcccaccggcagccagaagaagttggaaatcgccaccagcagcgtgaccagcaggctgtcagaggcgctgagcatcagcacctttttaccaaaggtcggggcatagacggtgatcaggtagaacgcggtggtggtcatcgccaccatcatcatcccggcgataaccacctgccagttcgccagcagggtggcgaatacctggcgcatcgccagatgatggcggcgggcagtaaactcctgggtctcctccagcttacggcgcaggataaaaatgaacggaacaatcaggcagccgaaaaggaacggaatacgccagccccagtcgctgatagcgctcggctccagtaccgcgttgagggcaaagcccatcgcggctgccaccatgatggcaacctgctgactgcccgactgccagctggtgtaaaagcctttgcggcccggggtggcgatctcggccagatagaccgacaccccgcccagctcggcgccggcggaaaagccctgcagcagacggccgatcagcaccagcagcggcgcccacaggccaatggtctgataagaggggatcagcacgatcaggaaagtgccggtggccatgatcgacagggtgacgatcagccccttgcgccgccccaccttgtcgatataggcgccaagtacgatagcgccgatggggcgcatcaaaaagccggcgccaaagactgcgaaggtcatcatcagcgaggcgaattcactgctcgccggaaaaaaggtatgggcgatgtaggtggcataaaacccgaacaggaaaaagtcgaactgttcgagaaagttaccggacgtgacgcgcagaatggcgccgatccggtcacgggtactcatctgtgaggttgttgaatgcatgcaggtctccagtttgttatccacgcgttgtcgcgcgcctgtcgctgaagactgaaacagaaccgggaacgaaataagcgtaataaacgcatccactaatgcattttacgcatgaataacatttaactaattaacattacttttacatacaatcatttaacacacgccgtcctaaccacgccgcgggtgacggcgaaaaagtcagttttccgttttgtgaccggggccaggatatgtcgccgtgggttgaaggcataaaacctggcctggggtaacgaaataccctgccggctggaaagcgcgtcaggaagcggtggaccccgccaccagcgtctgcaacagggagataagccagcgggtagcctcgcgtttcccgctgcgttggtgggcgtaaatcttgacgtcaaacggcggaaccggaaacggcagcgggaaaatggtcagccgggcggcgcgggccatcgtctccgccgcccgccggggcagcgccatcaacaggtcgctctgctcaataataaagggcgcgctcagcatcgagggggttttcatcgccacctgccgcgaatagccctgtcgctccagctcacagtccagcaccccctgccgctcattccacggggtcaccaccagatgacgggccgcaaggtaggcgtccagggtcagcgccgtccggttggcctggctgatgaccacatattcgtcccgcagccagttaatctcctcaagatcgggatgggctggctcgtcaggggtattgaacccgagggccaggtcgacctcgcccgccagcagctcggtcagcgccgggctgtggggcagataacggagctcaaaccgcagcccgggcgcctcacgctgcaggtgatgcatcagcgtcggaaagacgcagaacgcggtgaaatcggtgatcgcaatctgcatgcagtcggtgctggcggccggcacaaacgccgccggcggcgtcagctcctggttgagaaacttcagcgccgaagcgatagagggcgccagctggctggcatagacgctggggcacatccggtggccttcgcggtagaacagcggatcgttgagggcgctgcgcagccgggaaagcgcatggctcagcgccgaggtgctcatcgccagctcttccgccgccaggcgtaccgagcgggagcgatagaccgcgtcaaagaccggcaacaggttgaggtcaatccggcgcaggacaggatgcataatattcatcgtttgctgatttcattgcacttaattcttttcacaataccgcttatcctcagggtcagcaattttgctctcttttgactatggatacaggacaccccatgagcatcacaatccgccaggccaccccggacgacgccaccgctatctacgacatgatttatgaactcgcggtctacgagaaagccccccaagaggtagtgacgacgccagaggagatcagagagactctgtttgccagcggcagcaaaaccgaagcgctgatctgcgaggtggcgggcaaagcggtgggctacgcggtgttcttcaccagctactccacctggcttggacgcaatggtatctatatggaggatctgtacgtcacccccgactatcgcgggatcggcgccggaaaagcgctgctgaaaaccatcgcgcaatatgctgtacaacgtcagtgcgggcgtctggagtggagcgtgctcgactggaaccaaccggcgattgatttctatctgagcattggcgcgcagccgcaggatgagtgggtgcgttatcgcctcacgggagatgcgctgcgggcctttgcggagtaaagcggctcgccagcaggtcggcgccaggcgtcgacctgctggccgcggatcaggcttcgaccgcgctcttctgcagctgcggaccggccagcgccagacgcgcgcccgcttcggtatcgctgtactgcttgaagttatccataaacagctgagccaggctctcggccttctcctgccatttatccgctgaactccagccattacgcggatccagcaccgcgctgtctacccctggaatgctctgcgggatcgcaagaccgaacaccgggatggtctcctcgcgcagcgggccggtagtgccgttgaggatcgcgctaatgatgctgcgggtatcgcgcagcgacaggcgtttgccctcgccgttccagccggtgttgaccagccaggcttcggcgccggactccgccatcttcgccgccaggacgctggcgtactgggtcgggtgaagcagcaggaacgccgcgccatagcaggcggagaaggtcggcgtcggctgggtaatgccgcgctcggtgcccgccagcttcgaggtgaaacccgacaggaaatggtactgcatctgctcggtggtcagacgggagaccggcggcaggacgccaaacgcatcggcggcaaggaaaatcaccttcgacggatggcccgcgcgggacaccggcttgacgatattgtcgatatgcgacagcggataggagacgcgggtgttttcggttttgctgccgtcggcataatccacgctgccgtcagcgcgcaccaccacgttttccagcagcgcattgcggcggatggcgccataaatctccggctccgcctgcggatcgagattgatggtcttagcgtagcagccgccttcgaagttaaacacgccgtcatcgtcccagccgtgctcatcatcgccgatcagctgacgatgcggatcggtcgacagggtggttttcccggtcccggagaggccgaagaacagcgccacgtcccctgcttcgccacggttggccgagcagtgcatcgacgcgatgcctttctgcggcagcaggtagttcatgaccgagaacagccctttcttcatttcgccgccgtaccaggtaccgccgatgagctgaatacgctcgctcagattaaaggcgacaaagttctcggagttcatcccctgtgcctgccagttggcattggtgcagcccgcgccgttgagcaccacgaagtctggcgtaaagctggccagctcgtcggcgcttggcacgataaacatgtttttgacaaagtgggcctgccacgccacctcggtgacgaagcgtacgccaagacgggtgtccgggctggcgccgcaccaggcgtcgatgacgtacagttttttgccgctcagctggcccgcgaccaggcttttcaggctgcgccacacgtctggcgataacggtttgttgtcattgcggccgaggccggagtctgcccaccagacggtgtcgcgagtctgttcgtcgcggacgatgtatttatcgcgcggcgaacggccggtgaagatcccggtatcaacagccacagcgccagagtcggtcatcacgccgcgggccgcgccggtcagctcaggagaggtttcatgtgcaataagcaaatcgtaatcagggttgtaatagaattcgccgcttgcattaatccccagctcctgcagagccatttttactgattcaatttgttgtgacatggaactcctgacaaactatttaaggtaagaggcctgggttattcattgctttcgtcatcgtcgccggctatttaataagataagtcctggacaatgaaataaagcaataaataaccgtgagtcgcgatttcatatcgtgctcatgtagggtcgccgatatgcattcataaatctcaactttccaaaaaatgttaacacctgtcgataattatgttaattgcatagtttctatgcgctatgctaaaattgcatagcctttattgcgtttttgaggactggatcggtgttggcaaatctggaagtaaaatggctgtatgatgtgattgcccttgaggagtcgcgcagctttaccctggcggccaaagcccgcaacatctctcagtcttcgttcagccgacgcatccagtcgctggaggcttccctcggattcagcatcttcgatcgtagcgccaaccctctgcagctgaccaaccgcgggaaaatttttgtcggctatgcgcgaaatatgctcgatgacatggattttcagatcagccgtattaaaggcttaaataacaccacccagaaaataagaatcgacgccgccccttcgctgtcggtgttattactgccggagatcatcgccggttacaccgaccgtaaaaataagacttttcatgttgaatcgattaacgtcaacgacgccgtatttaacctgaaagagggaaaaagcgattttatcctctccttctataatgaagaattaatgaactatccgtttattaatcataaaatttttgattcttacctgcacctggtctctccctgcgacgaacatggccgcccgctgtttcatttacatcgcggcgtgctgccgctgatgaaatacgccaacgacagctatatggggcgccaggtgaaccaggtgatcgaccgcacgccggagattaccttctctctcacctttgtctcttccatgagcgagctgctcaagcgcatgatcctcaatggcgacggcgtgggctggctgccgcaatactctattcagcgcgaactggacgaaggccggctgacgatcctcgatgagagcctgtcgctgccgatcggcgcctggctctaccgctccggctcgcggcttaaccaggccgccgaacgtttctggcagcacattaaaacccgtaacgaaccgcgggaataaccccctcagccgctgatccccagatatgccttacgcacctccgggtcgttgagcagcgtctggccgctaccgctcaggcggatctggccgttcaccatcacgtaggcgcggtccgacaggttgagggcatggcgggcattctgctccaccagaaacagcgtcatcccctgggccgtcagctcgcgcaggatctgaaaaatctgcttcaccaccagcggcgccagccccaggctcggctcatccagcagcagcaggcgcggtctgctcatcagcgcccgggcgatggccagcatctgctgctcgccgccggagagggtcatcgcccgctgtccccgccgctcttccagccgggggaacagctggtacattcgcgccttgtcctcggcctgatagcggttgccaatggcaatggtccccattagcagattctcctcgacggtcatatcgggaaagatgcgccgcccttccggggcctgggcgatgccgttgctggcgataaagtgggtcgatttccggctgatcgcctccccgcgatagaaaatctccccgccggcaatgcgcggctggccgaagaccgacatcagcagcgttgatttaccggcgccgttggcgccgatcagcgccaccgtctccccctcattgacggtgagagagacctgcttcagggcctggatcggcccgtagaagacatctacctcattaaaggcaagcaaaggctggctcatcggcgcgtctcctcttcctcagcgcctagataggcggcaatcacgctggcgttggcctggatcgcctgcggcgcgccgcgggcgatgacgtccccgtgatcgaggacgatgatatgatccgaaatctccatcaccatccccatatcatgctcgatcagtagcaccgtgatgccgtgctgctggcgcagaaagcgaataatccggctcagcgcctgggtttccaccgggttgagaccggcggccggctcgtccagacagatcatctccggacgggtgcacatggcgcgggcgatctccagccgccgctgctgtccgtaggagagggtccccgccagacggttggcgcagtccaccatctccaccacctccagccagtaaaaagcgcgatccagcgcctgattctccgcctgccgatacccacgggtattgaggatcccggccagcagatggcggttgacctgggtatgctgggccaccagcaggttctcgatcaccgacatctcgcggaataaacgtatattctggaaggtgcgcgccatgccagcgcggttcaccagatgggtgccaccgaacatcttgtaatagatccgcctccccagctgcgccgggtggagaaaatcgtccgggtgaagcttctgccccagcacctgaataacatcggtgaccttttcccgcgcccgcagcacgatactgccccccgtcgcccgataaaaaccggtcaggcaattaaacaccgtggtcttgcccgcgccgttggggccgatcagggcggtgatcgacccccgctccacctccagattgacatcattcagcgctttgatgccgccgaaatgcatcatcagatgctcaacgcgtaagatgctgtcggtcatggcgcgactccttttcgcaacgcaaccccgctgcggctggtgcgcaccaggccgcgcggccgccagatcatcatcatcaccatcagcacgccgaacagcagcacccgatattcgtcaaaaccgcgcagcagctccggggtgaccgtcagaacaaacgccgccagtaccactcccagggtggagcccattcccccgagcaccacaatcgccaggatcagcgccgactcaaaaaaggtgaacgacgtcgggttaacaaacccctgatagctggcgaagaacaccccggcgatgccggccgtcgacgcgccgagcataaacgccgagagcttcaccagcacgtggttgagccccatcgcccgacaggcgatctcatcctcgcgcagcgcctcccaggcgcggccgatgggcatccgcgtcaggcgatgcttcaccagcagcaccagcatcaccaccaggcacagcacggcgtagagaaagatgaatttcaggttggggttgtagctgacgtggaaaaactcatggatggggatgccgccatccttggcccggcgggtaaactcgaggccaaacagcgtgggggatggcaccggtacgccgttagggccgccggtgaagctcacccagttgttgagcaccaggcggataatttcgccaaagccgagggtgacgatggccagatagtcgccatgcatacgcagcaccggaaagcccagcaacgccccggcgagggccgccatcaccgcccccagcggcagcatcgcccagaagccgaggcccaggtactggtagcccagcgccaggccgtaggcgccgatggcgtaaaacgccacatagcccagatcgagcagacccgcgaggcccaccacaatattcaaccccaggccaagcagaacgtagatcagcccaagaatggccacggtcagcagatattttgtggcgagaaacggaaagacaatggccagccccaccagcagcggtattatccagcgcagccgcgagcggtagcccggcggccggacgtataccccgtcatccgccccctcaaagcgggcaataaaggcttttcccctgtggctctgcagcagcagactgagcgccagcctgccggccatcaccaccgccaccagaatcgccacccgcgcaggcgcgagggtaaaaccataccctttgagcaccacgccgacgatcggaccaaagacaattaacgcgcaaaggccggccagtacgctgtcgatcagcgcgttttggatagcccgcgcaggctggcgcgtaatttcacccataaagcctccttagaccttggccaccagcggacgtcccagcagcccctgcgggcgaaaaatcaggatcgccaccagcagcgcaaaggaaaagacatctttgtaatccgaattcaccagcccggcgaactgggcttcggccaccccaagcagcagaccacccagcatcgcgccaggcagcgagccgatcccgcccagcaccgcggcggtgaaggctttgatgccgataataaatccgatatagaagtcgaaggtgccgtagttcatggtcaccagcacgccggccagaccggccatcgccgcgccgatgacaaacaccagggagatcacccggtcggtattgatgccaaggatcgccgccatgcgccggtcctgctgggtggcgcggcagatgcgccccagccgggtatactgaataatccaggtcaggataagcatccccaccagcgccgcgacgagaataaacaccttggtccaggtgatctgcaccaccccatcgcccaccgtcatgcgcaacgcgccgctaagcagcgtcgggatcccctgctggttcggcccctggctcagctggacatagttctgcaggatcagcgacatcccgatagccgagatcagcggcgccagccgcgtcgagttgcgcagcggccggtaggcgatgcgctcgatcgcccagccgtatacgccggtgaccacgatggtgaacaccagggtggcgaaaatcagcagcggaaaggagtggatcccgaagaaagagagcagcgccaggccgatggcgcacaggtaggcggagaccatatacacctcgccgtgggcgaagttgatcatgccgatgatcccatacaccatggtgtagccgatggcgattaagccgtacaccgcgcccagcgtcagcccattgatcagttgttgcagaaaaaacgccgtcatagcccctccagccgccaggcagacggccgccgggttccgttcccggtcaaccgccgtcatgtgacaattcgcaagtcaaaaggacagagcgccctcaggtcgtggccgatcagagctggtgatatttgcccttgtcgtcccactgatagaccacgtagtcggacaccttgaggtcgcctttgccatcccaggctttcttgcccatcaccgtctcgacgtcgtggctcttcagccagtcgctggctttggcgttatcggtaccgacggcgttccaggccgcggcgatagcctgaatggaggcgtaggcgtagagggtataaccttccggctcaaagccgctggcgcggaacttctcgatcaccgctttgccgtccgggagggtgcgcggatcctgaccaaaggtcatcagcacgccgttggtgaactgcggcccgccggcggccgtgaccagttcctcggtgacgatacagtcgccggagaagaatttggcctgcaccccctgctcgcgcatctggcgcaccagcgggcccgcttccggatggcagccgccaaagtagaccacgtccggcttgagggcgccgatcttggtcaccagggcgttaaagtctttttcaccgcgggaaaggccttcgtacaacacttctttggtaccccgcttcgccagcgccgcgcgggtggcatcggccagcccctgaccataggtgtctttatcgtggatgacggcgattttcttcgccttcagcacgtccagcatatagttggcggcgatcgccccctgctgatcgtcacgaccacacatgcggaagagatctttcatgccgcgctcggtgatctgcgggttggtcgagccgggggtaatggtcaggatcccggcttcgtcatatacctcggaggccggcatcgttgaggaagagcaaaagtgccccaccacggcggagactttcgcttcatccaccagccggttggccaccgccaccgcctgcttcggttcgcacgcgtcatccccctgcaccagcacaatcttttcgcctttgatgccgccggcggcattgatatcggccaccgcctgcgaggcccccttccagtactgggcgccgtaggtggcgttggggccggtaaagggcccggcgacgccgatcttcacgtctgcctgggcgtaaaaggccatgctcatacaacctgctatcacaacatgaagcgtcattgttttcagtttcaaagacattcggatattcctcagcgatgtaaagcctggcgtcatggaatgacgcagaaaatatcacttaccgtgtggtgccgacgttggcgcagcgccaggacggccagggtggaagaagcaaaaatcccgccaggaaggagtggaacaccggagaacagtcgccccggtcggtacgcacgcgacggcaacccgtgccgcatccggcaagggcgcattccctttcaggtcaggagatcggttgccatcacgtggcgagccggacaacgcggtatccgtaccggcccgtgagctaaacatagatgcagttagcggtcgctgcgcgccggcgtggtgcaaaaatgcgaatatgatcaacagtggtgatttttttgttgcggtaatgtgaagatgataacaggagagcccgtaaaggctctcctgtgacccggtggccgctcagagttggctggtgaacgttcgggagatcacatcctgctgctgttcgcgggtcagcgcgttaaagcggaccgcatagccggagacgcggatcgtcagattcggatactgctccgggtgttctatcgcatcgagcagcttttcccggttcagcacattgacgttgagatgctgtcccccctccaccgtctcctcgtggtggaagtagccgtccagcaggcccaccaggttgttttcctgcgctgacggggctttgccgagcgccgccggcacgatggagaaggtatacgagatgccatctttggcgtaggtaaacggcagtttcgccaccgaggtcagcgacgccaccgcccctttccggtcgcggccatgcatcggattggcccccggagcgaacggcgtccccgcccgacgtccgtccggggtgttgccggttttctggccgtataccacgttggaggtgatggtcaggatcgactgggtcggcaccgcctgacgccatgtggggagcgcctgaattttgcgcataaagcgctccaccaggtcgcaggcgatggcatcggcccgatcgtcgttgttgccgtactgcggatagtcgccttcaatgacaaagtccaccgccagcccgtggtgatcgcgcaccggcttcacccgggcgtactttatcgccgacaacgaatccgctgccaccgacaggccggcgatgccgcaggccatcgtgcggtagacgtcgcggtcgtgcagggccatcagcgccgcctcgtagctgtacttatcatgcatgcaatggatgatgttcagcgcgctgatgtactgcaccgccagccagtccataaagtggtcgaggctggccatcacggtgtcgtagtccagcacctcatcacgcagagggtcggttttcggccccacctggatcttcagtttctcatccaccccgccgttaatcgcgtagagcagcgttttggcgagattggcgcgggcgccgaagaactgcatctgcttgccgatcaccatcgggctgacgcagcaggcgatggcgtagtcgtcgctgtgaaaatcgctgcgcatcagatcgtcgttctcatactgcagcgacgaggtggcgatagagacccgggcggcatattttttaaacgccgccggcagcgcttgcgaccagagcacggtcaggttcggctccggcgccgggcccatggtgtgcagagtatgcagatagcggaaggtggttttgctgaccagggtgcgaccatccagccccatgccgcccagcacctccgtcgcccagatgggatccccggagaacagcgaatcaaattccggggtgcgcaggaaacgcaccatgcggatcttcatgatgaagtgatcaatgagctcctgggcctgctcctcattcaataaaccggcgcgcagatcgcgttcgatatagatgtcgaggaaggtggccgtgcgccccagcgacatggcgccgccgttctgcgacttcaccgccgccaggtaggcgaagtagagccactgcaccgcctcccgggcagtgcgcgccgggtgagagatatcgcagccgtagcgggccgccatctcctgcatctgcagcagcgcgcgccgcttttcggccagctcctcgcgcaggcgcagggtggcctccagcgcctcgccgcgctcaagggccggctgcaggtcggcaaactgcagctcacgttcgcggaccaggtagcgaatgccgtacagcgccacgcggcggtaatcgccgatgatccgtccgcggccatagccgtccggtagcccggtcagcaccccggatttgcggcagcgcagcatatccggggaatagacgtcaaaaacgccctgattgtgggtcttacgcagcgccgtaaactgatactcaaagtcaggatccatttcgcgaccataggcctcgaaggcgcttttgatcatcttgatgccgccaaaaggatgcagggcgcgcttcagcggctggtccgtttgcaggccgacgatcttttccagcggctggttgatatagcccgccgcgtgggcggtgatggaggtggcgacattggtgtcgaaatccaccggcgcatgggtggcgttctcgacgcggatcccggccatcacctgctcccagagggcggtggtcgctggcgtcgcgtcggcgaggaaagactcatcgccctcgtaaggggtgtagttatgctgaataaagtcgcgaacgtcgatctgcgtttgccacgccgtaccgcgaaagcccagccaggcgtcagcgtatcgtacatcctgggtatcgatatctactttcatgaacatcgtctctctacagaataaaaagtcaggccagcgccgccgcggtgtggatccggcctaagcggatcgcatcgagggcaatcatgcgctcttcattggtaggaataaccgcgcagcgcacccggctgccgtcggcggagatcaggcgctcgccggccgaattgggctgctgattgcgggcggcgtccatcgcaaggccaaagaccgtcagccgctcgctcaccagccgacggatcagcaccgagttctcgccaatcccgccggtgaaaataatgccgtcgagacgctgcagcgccgcggcgtggccggcaatatggcgggcgatacgatggacaaaggttttaatcgccaggcgggcgcgggcatggccctcatgccacgcctgctccagcacccgcaggtcggaggaaagaccggagatccccagcaggccggaggcggtgttggctacccgctccaggtcgctgagggtctgccgggtttccccggcaatccacgccatggcgccgaagtcgacatcaccgctgcgggtgcccatcatcagcccctccagcggcgtcatccccatcgaggtgtccacgctgcggccgttacgcaccgcgcagatcgaggcgccattgcccaggtgggcgatcaccaggccgctctcctgctccggcaacccgagcagcgccagggcgcgctgggacacatagcggtgcgaggtgccgtggaaaccgtagcggcgtaccccgagattctggtaatactcccacggcagaccatagagaaaagcttccggggccagggtctggtgaaagctggtatcaaagaccgccacctgcatcacctccgggaacagccgctgcgccgaggcgatgccgctgagactggcgtagttatgcagcggggccagggacgatacctggcgaatgttattgataacctcctcgctaataatgaccgactcggtgaacaggtcgccgccgtgggcgacgcggtggccaatcagggccacgctgtcgatgaggtcgcgttgggctaatgccccggcaatcgcctgcagggcgccttcgtagccgcgctgcgccagcgccaccggctcgccgccgttgagcgagagagatgcccattccgcgttgatgccctcggccacgccgttgagcaggcagtcgcagcttgcggcgtccaggacggaaaatttgattgacgacgagccgcagttaatcaccagtactaccggaaattcagtcatgttgtactccgcgtggcctgagccggattagaacagtttgtaagcaatgttgaggatggtcagcagaccgatagcggtcacaaagaggttgtcgagacggccacggtatttggccagcgaaggcgctttacgaatggcgtacatcggcagcaggcacagcagcgaggcgataatcggcgcgcccatcgcctcaatcaggtcgaggatattggggttggcatacgccaccacccaggtcgagcccatgatgaacaccatgctcagggtattgagcttgccgctggagacccgggttttatcccctttatagccaaagcgcaggatcagaccgttcagcccttcgagcgtgccgagatagtggccgaaaaacgatttgaagatggccaccagggcgatgatcgacgcgccatactccagcagggtggcaaaggtggatttggtgcccgacatcgaggcaaagtggttcgccagataggagagcaccgggatattctgggccttggcgtccgccatgttctgcggtgagagggtaaacaggcagctgaaggcgaagaacatcaccaccgccaccatcagcatgctggcccgggagatgatctgtgagcatttgcgttcggtatactcgcggccaaactgcgcttcatactcttcgcgtttggagaccacaaacgaggagacgatcggcgagaagttgaaggagaacaccatgatggagatgcccagccataccgtcaccagaatgccgtcgtgaccggttaaggcgatatcgctgaggttgacctggtcaatcactgcgctattccagtaggggatcagggacagggagatcaccaccaggctggcgataaacggccacaccagatagctcatcaccttgaccatcaggtctttaccaaaccagatgacaaacgccatcagcagcagcaggagcagcgccaccaccccgcggttgagagccggcatctgcagctggttctcccagaaagtcataaaggtattggtgatcgtgacgccataaatccacagcagtgggcagatggcgaagaagtacagaaaggtgatcaccaccccgccggttttgccaaaatgctcttccaccgtttcggtgatattgccggagggattagcccccgacaggcatagccgggccagggcccgatggcaataaaaggcgatgggataggccagcaccagcatcaccaggatcgggatcagccccccgaagccggcgcggatcgggaaaaacagcaccccggcgccgatagcggtgccaaacaggcccagggtccaggtggtgtcagatttacgccaggacgaaaggcttgtctggctggatgcaatgctctcagtcgtactcatatcctgtcctcacttatgtattgaattaagcgtcaacaaaaccggtaatttgcgatacccgggagagatcgatattgcccccggaaatcaggctgaccgttttgcggttctggatatagctgtcgagtttgccgcttaataacgcggcgcaggctaacgccccggccccttcggtgatcactttattgcgctgaattaaggcgaccatgctctggcgaatgtcgtcctcactcaccaggacgatgtcatccaccagctggcgggcgatttcataggtcagtttccccgggcgggcgacgtcgcaaccatcggctaaggtgccggcgtggcgatggctggtgatttccccggcataccaggaggcggccatgccgtgaacattctccgactgcacgccgataatgcggattgtcgggttaatggatttaatcgcaatcgcgataccggcaattaagccgccgccgccaatgggcacgatgacattatccacgtcatacagatcttctaatatttcgagtccaatcgtcccctgcccggcgataacctgcgggtcgtcataggggggaataaaaatgcggccctcaagttcaacaatatcgctggctttggcgagggtatcgttaaagttatcgccatgtagcaccacttccgccgaataatcacaggtggcggcaactttcgatttcggcgcccctttcggcatcactactttcccgtcaatgcctagcatggcgcaggagagcgagacaccctgggcgtggttgcccgctgagcaggccaccacccctttgcgtttttccgccgcggttaaaccgcacagtttattaaaggcgccgcgaattttaaatgaacccgtgcgctgcatattttcgaatttaagaaatatttcgccctggcagcgctcgctaaaataattcgaacggggcatgcctgttttatatatttttcccgcgaggcgttgtttcgcttcgagaatatcgtcaatagataccggaagatcgtaggtaatatgcattatggcctctgtatcttaatataaagtcaatgaccgggcgtcatcctgctgataacagcgaggacgtgtgttggattatttaacgactttcagttacgcaataatttgtaatggctgccagtggcggttgccctgccccgaggaatagtgtttcgccatctccaccagcgacgccgcggcggtttttaaccggtaatttttcgaccataccgccgcatagcgcgccaccggcaaggcctctttaatggggatggtgacaaactggctcgagccaaacggcgtggtcatgtcgcaggggatcaccgtcagaaaatcggcattgagcaccaggttatagatcgtcaccaccgaatcggtattaacgatattttcacggcggataccgctgcgctgcagggtggtcagcagttcgctgtagtagcccatattggtctccggcagcacccactgctcgtgctggagcgaggccaggcggacggtgccgttgccgatccgcgcccggttcgccaccagcacaaactcagactcaaacagcggctcgacgtgcaggtcctgcagtttcatctcatcgctcagcgtcccgatggcgaagtcgaggcgcccgtcgcggattgccggcaaaaaggcggagagctgcgcctcatacatcgagacccgcgccttggggaaagtcattttaaactgatgcaccatctccgacataaaggtaaacccgaccagcgaagggaaaccaaaggagacatccaccaccgcgctgttggtcagagcattcatttcattgaccatatttttcatttcacgggtgatcgcttctgaccagttgagaaatacctgcccggcctcggtgagcgagacgccggtatttcgccggacgattaattcgctgccaaaataactctccatgtcgccaataattttactgaccgccggctgagtgagtcctaacgcttttgctccggccccgattgacccgctgcggatcacttcctggaaaactaccagatgctgtgttttaggcagagaaaaagtattcatcgcgtctcactttcattcctttgttgacggcggaaagtgtaacaaatcgcaattgccgggttatgtgagagctctcacaaaggctccgccgcggcggataagcaggatccacgagccagaataagcaaattaaaatcaatacattacaagcatcatgaccgctatttgcgcgccttttgccgtggccgaatgcggggataaaaataattgatggcgataacatcgacggcgaaatggcgataaaaaatacgtcttttgtacgttattcgacccgcgctatcagggtgagaagaaagccgaaaattaaattaatgctgtaaagaataaaaagcagacgtaataaacgccattatttaacgacaagccggtcgggcatcacattttatccccggcggttggggaaaatgcacggtcattatttacaccaaagaaacattaaattcacaatttttcttttgggtcgcgataggcagcgatcttttttccgccatagcgcagttggtcatactttgattaaaatcaaccctggtaatttatcttttacgacggccattggagagtcatttgtgttgccgatcacaaatccataaaacaacgacccggcctatcgtgaagagatgatcccgcggctgcgccagcagcttaacgagcagctgatgagcgaccagctggctgtcgacctgctctcttcctatctgcgaatggatctcagcgcccagccgtgggaccagccgctatagcccgccccggcgcagatcgctggcccgggcatttcgcctatagctggctgacccccagcgccgcggcctcatcccgccacgccagcagcggcgcataggcctcccgcgacatatcgctatagccgcagatcagcaaggcgtcgcacagggaacgatagcgatcatcgcttaccagctgctggagcgcctcgcgcaggctattcagcgttgccgccggggtggcgccggcggtgatcagcggcagccctggcgcggccgggctccagccgatcgccaccaggccagccagagcctgcggctgatggcgctgcagcagagcgtaggtcacgcagtcgatggcggcgatatcggcgttttcctgctgcagttcgcgcagcgattgccgatggctgccgctgaacatcaccgctgaaaaaaaacgcccctcccgggagagcggcgcgaccattttacgcagtacgttgtagccggactgcgagtgctcggcattgcacaccgcccgacggccaaaaaagtcccccagcatccggtgactatccgcttcgcggaccaccagcaggctgcgatagcggcgcccttcgcaaccgggcgcagcgtagtggaagcagcccaccgtctgcacctccggcaattgggtcaccagcgggtagccacaggtctggctcagcaacagcgtcggctggcgccagtgagccagcagatccccggggtcagccgccggagggtcccccgccaccatcacgccgcgttcgtccagcagcgactgcaccgcctgccacagggcctgggtctgttggcggtggatggcatacatcggaaaagtcatgcgttcagccatgttctcctcccgcctgctcgccaaagcccggatgggcgttcaccgccaccgcccggcggctaaaatggcgtcgccactcgccgtacccgcgcaccaggaacccctgattacgctgcagatacgccgcctggcgatgcagatacagttgacgtaaagcgtaccaggggacccctggcagatcatgatgcaccgcatggtagttgagattgaggaacagcgcccgccaggggagcccggcctcgttgatcaccgagcgggccagcgggtcatccgcggcgcggtgttcgagaaaagagcgtactttggtcagggccagcgccgggtagctcaccgccagcacaaaccacagcggagaaaaaccctgcgccgccatccaggtcagcaggcccgtcagcagcaacagatgcagactccacatggcgatagcgcggcggtcgccctcgtggaaagcccgcagcgcgctgttcagggtgtgaataatatccatcatcggcgccagcagcagacgcccccagaaggtgttgcgcaggtggataaggcggcgctgccaggctgagaagcgctgccagctttccgccgttacgtagtacgattcggggtcatcctcagggtgcgtcagcagatggttgcgatggtgcgccaggtggctgtcgcggtagacgccatagggataccagaccgccagcggcagcgtccccaacagctggttaaaccatgccagccgggtgggatgcccatggatcagctcatgctgtaaggacatataccaggcggtaaaccagatcaacagcagcgtggccggaaacagtcccagcgtccgccagcccgccacgcaggcaaaccagccgccgtaaaccgtcacaatcagcagccaggtcggcagctcgctgcgccacagccagctgcgcgccagctggcggatcaggatgcgctgttggtcatccacatagacagccgtcttcttttccgtcacttccgataccttgccgtgttgcctcattcccaccgaagatgtgagataacacgttaaataacaaagtatttaattgacttagctttgccaaaaagcgcgtttgtgttcaacagggcaaagagaataccgtccatggcgcaacaggttggcggtgtttaaactggtccatcatccggcggcgctgcgcttgccgggcctatgggataacccctccccgggccatccaggccggtgcaggcgcagcgccgccggacaaggacagcggcgccgcttttgtgccgggcggcggcgacgccttgcccggcctacgatgcgtgcggcctgtcgttaatttatttaccgctgttgctgaaattttaccgccaggtcgaggatacttaaggacaccagcgccttacccgccttcgcgccgacgataccggcggagcgtcacagaggctactcctcttcccgctccgctggcgtccaggtcggcagagtctggaaggtgtgcaacagcccttcggaccacgccttgcgaatgcggttgaagtagggatcgctgtcggtgatgcgatgctgcccggcactgctgaagctgccgctgcggtagagcagcgtatccagcggcaggccgacggacagattactgcgcagcgtcgagtcaatggagatcaacgcgcagcacatcgcctgctccagcggcgtgtcgatggtcagcacccgatcgatgatcggtttgccgtatttgctttcgccaatctggaaataaggcgtgtcgcgggtggcttcaataaagttgccctccggataaatatggaacagacgatgggtttcgccggcgatctggccgccaagcagcaggttgcagttgaagttggtgttactgcaggtctgctggttgctgctgtcgcgctggatcacctccagcagcgttttaccgatcagcatcgcggcgtcgtagagggaagtgacctgcatcagattcggctcctgctgggtacggatgcgcgcgctgagcaggcttatcacgctctgggtggtggccagattgccggcggattgcagcaccagcacccgttccccctcctgatggaaaacgtgcagctttttaaaagtggcaatatggtcgacgcccgcgttggtgcgggagtcggaagcaaacaccagtccatccgccaggcacatggccacacagtaggtcattgcggttattcccgtattattgctgctgcgcctgctggctgtgttcgcgcacttcagcgttagttaacataatctccccgccgccgcccagccgggtgccccgtaccgggcaggcgtcgagataatccagcccggtcgccagccgtaaatgctgattcaggcgacgggtattattggtgatatcaaacgacagccagcggccgtcgagccagacttccgcccaggcatgcatcgccacatgctgggcgttatcgctgtagacatagccgctgacgtagcgcgccgggatctccagcgcgcggcagcaggcgagaaaaacatgggtatgatcctggcacacccccttcgcgcgggcgaaggcgtcggcggcggagtcctgcacctgggtcgcgccgggggagtatggcattcttaacagcagatccgccatcagttgattcagactctcttccgccgcatcgggacgatagaggcgctgggcaaactcacggatcgccgtatcggcgcgggttagcggcgtacagcgcagaaaaaccagcggcgacagcagctcggcctcttcatcacgcgtctcctccccttcgtcggcgatatcgacaatcccgctggcgcggatggtgatctccttgtgcgggttatccagcgtcagcacatgcagcacattgccccagccgtcggtagtggtcaccgccgcgccgtccggcagggtcagcgtccaggcggtgatcgtctgccgggcggtactgcgcggcgtcaggcgcagatactgggtggaaaacttcacttcttcatcgtagccatagcgggtgagatgatcgatgaccagtttcataaggcctccagataggtttgtctgatgctgtcggacagcgcgttaattctcgccagcagcccgttaagggtggtctgcaggtccgcctgcgccaggtcgtcacgggtgctgaagcgcagatcaacgttgagctgatgggcgaggcgcagcggttgataggagcggtcgttagcgatcttctccagctcgcccaccagatcggcaatgctggcgcgcagcgaacgcggaatatcgttccgcaggatcagcagctccatcaccgtttcgcgactgaccggctggcggtagaggctgttgtaggcttcgcgggcgctgaccgcattgagcagggtatccagccggtagtattcccgcaccggatccgggtcgttggtcagctgttgatccttaatcagcagcagctgggtggtggcgaaggcgcgctcaatcagggtgccgataccgataaaactcagggcgtcgttgcgcagcagcgtgccgatcactgccccgcgaaacagatgcacccgctctttcacccactcaaaaaagccgtcgctccccagctcgcccagcccctgctggcggagggtccgcagttcaatgcgggtggcattgatgctctcccacacttcggccgacagactgccgcgcaccgcgtgcgcgttgttccacgccatctccacgcagctgtaaatactgcaggggttgttgccatcaagggcaaaaaagttgagcagattgctcatggtaaagcgggcatggcgcgcctgaaacagctcgtgggtcatcgacaaattcagcggcagcgccagatcccgcgactgctggctgtggcggggtatcattgataatttccaggtcacgtccagcacccgggcgtagctctccgcccgctcgagatagcgggccatccagaacagttcactcgccgtacgacttagcatgatgcgtcatcctccatcacccaggtatccttggttccgccgccctgcgacgagttgaccaccagcgacccttcggtgagggccacgcgggtcaggccgccgggcaccagccgcatctcctgcccggacagcacgtaggggcgtaaatcgatatgccgcggcgacagcccttcatcaacgaaggtggggcaggtcgacagcgcgagggtgtcctgggcgatatagttggccggattggccagcaggcgctggcggaaggcctcccgctcctctttggtggaacgcgggccgaccagcatgccgtagcccccggcgccatggacctccttgaccaccatcagctcgagattgctcagcacgtagcgcaggtcctccgctttccgacactgccaggtggggatattgctgaggatcggctgttcgccgaggtaaaagcggatcatctccgggacgtacggatagatcgatttgtcgtcagccaccccggtgccgatggcgttggccagcactacgccgccggcgcgatagacggacagcagccccgggacgccgagcatcgaatcggcgcggaaggccagcgggtcgagccaggcgtcgtcgatgcggcgataaatcacatccacccgccgcggcccctcggtggtgcgcatatacaccgcgccgtttttaataaacagatcggcgctctccaccagctcgacccccatctgctgcgccaggaagctgtgctcgaagtaggcgctgttgaagcgacccggggtcatcaccacgacgcagggatcatccaccagcgagctttcgcgcagggtctgcaggaggtagctcgggtagcgctccaccggcgcaatatgatgctgctcgaacatctccggatagagacgcatcatcatcttacggttttcgagcatgtaggagacgccggacggcgtgcgcagattatcctccagcacgtagtactgaccgtcgttattgcgcaccatatcgacgccggtgatatgggcataggtattgtttggcaggttgatgccctgcatgcacggctgatactgctcgttggccaacacctgctcggccgggatcagccccgcgcgcaggatattctgctcatgatagatgtcatagaggaaggcgttcagcgctttcacccgctggcgtatgccgcggtcaatgcgctgccactccccggcgggtatgatccgcggcacgctgtcaaacgggatcagccgctcggtcccctcatcctcgccgtacacgttaaaggtgatgccgatacggtgaaaaagcagttccgcttgcgcttttttctgccggatagagaattgatcggtgttgcgaaaccattgccaccaggcattatagtgcggccgctgttcaccctgcgcggtcagcatctcgtcataataatgcccgtcaggtagcgtaattttaatcatggctatcccctccggttgtactcactttgtggtaatcccgctaagagataagcattaattatgccaggtcatctgccgccgcggcgttgtgcaaatcggttcagccccgccgtctggttgtgcaaaaaatcgccaaaacagccgcccgcgcccggcggcggctgcaccgtcgtgaggcagggcgacgttttttgcgccatcgtggacgccagcgccctcagccaggcggcccagcccgcggcggtctcaggagacctggcaggtaaatcctctgttttcgcgcaaaatgttacccctgacacgcgcagcggcagatattcgtctaaggtttttggatggccaaacgtcgtggcccgcagtcgataatgataaggagaactccccatgacgagtactgatgcacgtcgtcccgctgctttgccctgttccctgcgcctggcgatcggcggcgctctgatcgccctgatgagcctgaacgctcaggcggaagacggcaaaaccgcgccgcccccctcgccggatattctgctgggcccgctgttcaatgatgtccagagcgcgaagctgtttgccgatcagaaaaccttcgccgacgctatccccaacagcgatccgctgatgatccttgccgattaccggatgcaaaaaaaccaggccagcttcgacctgcgccacttcgtcgaactgaacttcacgctgccgaaagagaacgacacctatgtgccgcccaaagggcaaactctgcgtcaacatatcgatggcctgtggccggtcctgacccgcagcaccgtcgaggtggaaaaatgggactcgctgctgccgctgcctaagccctacgtggtgcccggaggacgtttccgcgaagtctattactgggacagctatttcaccatgctgggtcttgccgaaagcggtcactgggataaagtcgaggatatggtcgccaacttcgccgcggaaattgacgcctggggccatatccccaacggcaaccgcacctattatctcagccgttcgcagccccccttcttctcctttatggtgagcctgctggcgacgcacgatggcgaccaggtgctgaaaacctaccagccgcagctggagaaagagtatcgctactggatggccggagcggacgcgctggctcccggcagcgccgacaaacgggcggtgcggatggcggacggcgcgctgctcaaccgctactgggacgataacgacaccccgcgtcccgagtcctggcttgacgacgtcaaaaccgccaaaagcaacccgaatcgtccggcaaccgagatctatcgcgacctgcgctccgccgccgcctccggctgggatttcagctcccgctggatggacaatccgcagcagctcgccaccattcgcaccacctcgattgtcccggtcgatctcaatgccctgatgttccatctggagaaaaccctcgcccgcgccagcaaggcatccggggacagcgctggcgctacgcagtacgatgcgctggctaacgcccgccagcaggccatcgagaaatacctgtggaatgataaagagggatggtacgccgactacgatctgaaaacccacaaggtgcgcaatcaactgaccgcggcggcgctgttcccgctgtacgtcaatgccgcgtcacgcgagcgggcgacgaaagtggccgccgccgccgagtcgcgcctgcttaaacccggcgggctgaccaccaccaccgtcaacagcggccagcagtgggacgcccccaacggctgggcgccgctgcagtgggtggcggtcgaggggctgcaaaactatggtcagcagaagatcgccatggaggtcacctggcgcttcctgaccaacgtgcagcatacctatgacagtaagcaaaagctggtggagaagtatgacgtgagctcgaccggcaccggcggcggcggcggggaatatccgctgcaggacggctttggctggaccaacggcgtcaccctgaagatgttggatctgatctgcccgcaggagaaaccctgcgatgcgctgcccgctacccgtccggcgacaaccccttcaccgcaggacaaacctgttgcggcgcccgcggctaacgaccccgcccctgcggaaccgcaaaagaccggctcctgacgcttcgccgccccctaccaaaatcggtagggggaagcggtctccctggtcactaccgtcccgtgcagacccattctgcggctcgcgggaaacacttccccacgccctcgcgttgaacaggtcaccttttcgcttgatcgcacaaatacaaacaataataattcgcattactttttaacgaataatgacagattcgtttttcacgcggcggcgtacaggagtaccagaccgcgttggttcaggatgatcttatgaacgtggctatttctcgaaaacgcccggggctgctgtatgcccttgcggtcacactccccttcaccgcgcaagccgaagagacggtggtggtcactgccaccccgccggcgtccgccagcgcgccgacggagggctacagcgccagcacctcgctcggggcgacgaaaaccgaccagccgttaatcactaccgcccagtcggtgtcggtggtcacccgccagcagatggcggatcagggggcgaataccatcagccaggcgctggaatataccccgggggtctactccagcttcggcggcggcgccacccggttcgacgccatctccctgcgcggctaccacggcggcgacgtcgataacctgttcctcgacggcatgcgcctgatgagcgacggcggcagccataacgtactgcaaatcgacccgtggtttatcgaacgcgtggatgtgatccgcggcccctcctccgcgctctacgggcagagcgtgccgggcggcgtggtcaacctgacttccaaacgtccgcagttcagccagcagggccacatccgcctgaccggcggcacgcaaaataccaaaggcgcggccttcgattacaccgacgccatcaatgaccagtgggcatggcggctgatcgggatgacccgcagcagcgacacgcagtatgaccatacccgcgaagagcgctacgcgatttcgccttccctgctgtggcagccggacagcgacacctcgctgctgctgcgcgcctatctgcaaaaagatccttccggcggctaccacggctctttgccgctggacggcacccgctacgcgcacaatggccgtaaactctcccccagcaccaacgaaggcgatccgggagatggctatcaacgccgccagcagatctacagctatgagtttgaccaccagttcaccgacgtctggtcggtctattccgccgggagctacacccataccaacgtctccctcgatcaggtctaccaggtcggctggatagatgacagcgacatgctggcccggggctacagcggttcgcgcggttcgctggacggctggtcaaccgataaccgcctgcgcgccgatttcaatacaggcgacctggcgcacaccctgatcctcggcgccgaatatcatcgcttccgtaacgacctgtggaccggcgccggcggcgcggcgccccttaacccgtttagcggctataccgcgcagaccggacataccgttacctacagcgacgacaataatcgccgctattaccagaccgggctgtatctgcaggatgagatggtctggaaccgctggcatgtggatgtttccgcccgctacgaccgcatcgtttcccagcaggtcagcgatacccaggggacctcaaaccgccgttcagacgaccatatcagcggccgcgcctcgctgttgtacgccctggacaacggtctgtcgccctacctgagctacagccaggcgatcactccggcgatgctgccgggcgcggacggcaaaccgttgaaaccgaccaccgccgaacaggttgaagccggcctgaagttccagccgccgggcagcagcgatctctatagcatcgcgatttacgacctgacgcaaaaggatgtcgccactcgcgacccgaacatcgccaccgccacctatattccggcgggtaaggtccattcccagggcgttgagctggaagcgcaccaccagatcaccccgcagctgagtactatcgcctcgtatacctggaatcgtctgcgtttccaggacaccaaagacgggaccgacaataacacgccgcagctgtccccggatcagatggcctccttctgggcgcgctatcagttcccggcggggatctccgttggcgccggcgtccgctacatcggtaaacagtgggcggatgatgccaacaccgcgcggctgccgtcggtcacgctgatggacgccatgatgcgggccgacctcggcgtctggtcgccaacgctgaaaggcgcttatgtgcaggttaacgccaacaatatcggcgaccgcgagtatatttccggctgctatggcaccggcaactgttactggggagcagagcgcagcgttatagccaccgtgggctacgatttctgaggacgtggcctccgggagactaccggaggccaaacgagggattacatggcgtccagcgctttctgtagtttccagatatagcgcggcgcctgcggtgccgggtgttttttcaccacatgttcgaagaactcatcggcgtcgagatcgttaatctcctcgatggcgtcctggcggttcgaggagaaggtacgcagcagcgcgccagcgccgttggcataggagaccaccaccgcatagcgcatcacctgcgggtctttgatccccgccagcggaccgttctccagaatgctcagataggcggcccccatcgagatattacgttccgggtttttcagctcactgaccgacggctcgccgcgccaccccatccgccgatagacatcgcgtccggaggtcgacggcttgagctgcatcagcccgacggcgccggatttactcaccaccgcaggattaccgcccgactcgatggcgatgatcgccgtgatcagctgcggatccacgccccaggcggcgccggctttttcactgatcggcatccactgcatcgcccgcttcaccgggacctcagggttccacggcggattggtgtaatcatgtttcgaactacaaccggccagaaaaacgactaaaataagcaaccatctcaatttcacacatctatccttatctacccaaacgccatcatgctacagaacgacggccgcggtacgtctcccgcctgccgacaacctgaaggatgacgggtgcggactgaagttagccacctggagatgacaatcgccattccaggcggcatcataaccctttcattcatagcaaggaattatcatgtctcagttttatctggtcgcgccatccggttattgcatcaaccagcaggcggcagcccgcggcgtcgagcgtctgcagcaggccggacacgaggtggcccaccagcaggtcattccccgccggcagcagcgtttcgccgggactgaacatgaacggctggccgatattaaccagctggcccagttgcccggccgcaaccggatcgtcctcgccgtgcgcggcggctacggcgccagtcgcctgctgccgcatatcgactggcagggactggttgcccgccagcagcgcgacccgctgctgatttgcggccacagcgatttcaccgctatccagtcaggcctgctggccatgggcaacgtcatcaccttcagcgggccaatgctcgccggcaacttcggcgcggagaccctcgacccgtttaccgagcaccatttctggcaggcgctacgccagccggaattcaccctcgaatggccgggcgaagggccgaactgccgggtggaaggcaccctgtgggggggaaatctggcgatgctgacctcgcttatcggcacgccgtggctgccggcgatccgcgacggcatcctggtggtggaggatatcaacgagcacccgttccgcgtcgagcgcatgctgcttcagctgttgcacagcggcgtgctggcggcgcagaaagcggtgatcttcggcagcttcaccggcagcgcgccgaacgactatgacgcgggatacgatttgccgcaggtctttgattatctgcgccagcagctatccctgccgctgattagcggactggagtttggccacgagcagcgcacggtgaccctgccgctgggcgcccgcgcgcgcctggtgaatcaggcggcggccaccaccctgacgatcggcggccatccggtgctgacagaataaatttcccgaacgcataggcggatcccctgcgaattgttaaaatagtgtcacttttagccattttttcacgccagtcagggagtacgtgaacattggacgccgctgcggtcattagtctgtttattctgggttctgttttagtaacctgcagtatcttattgagctccttttcttcgcgccttggcatcccgattctggtcatctttctggccatcgggatgctggcaggcattgacggcatcggcggcatccccttcgacaattaccccttcgcctatatggtgagtaacctggcgctggcggtgatcctgctggacggcgggatgcgcacccaggccagctcctttcgcgtcgcgctgtggcccgcgctgtcgctggcgacggttggggtgctgatcacctcggcgctgaccgggatgatggcggcctggttgttcaagctggatctgatcgaaggcctgctgatcggcgccattgtcggctccaccgacgccgcggcggtcttctcgctgctcggcggcaaggggctcaacgagcgcgtcggctcgacgctggagatagagtcaggcagtaacgacccgatggcggtcttcctgaccatcaccctgatcgaaatgatccagcagcaccaaaccggcctcagctggatgttcgccgtgcatatcattcagcagttcggcctcgggatcgccatcggcctcggcggcggctacctgctgctgcagatgattaaccgcatcgtgctgcccgccggcctctatccgctgctggcgctgagcggcgggatcatgatttttgccgtcaccacctccctcgacggcagcggtatcctcgccgtctatctctgcggctttctgctgggcaaccggccgatccgcaaccggcacggcatcctgcagaacttcgacggcctggcgtggctggcgcagatcgccatgttcctggtgctgggcctgctggtgacgccctccgacctgctgccgatcgctatcccggcgctgctgctgtcgatgtggatgatattcattgcccggcccctgtcggtgtttgccggcctgctgccgtttcgcggctttaacctgcgcgaacgggtgtttatcagctgggttggcctgcgcggcgcggtgcccattattctcgcggtgttccctatgatggccggcctggacaacgcccgcctgttcttcaatgtcgccttcttcgtggtgctggtgtcgctgctgctgcagggcacttcgctgtcgtgggcggcgaaaaaagccaaagtggtggtgccgcccatcagctggcccatctcccgcgtcgggctggatattcacccggaaaacccgtgggagcagtttgtctaccagctgggggccgataagtggtgcatcggcgcggcgctgcgcgacttgcacatgccaccggatacgcggattgccgcgctgtttcgcaacaatgtcctgctgcaccccaccggcagcacccgcctgcgggaaggcgatatcctgtgcgttattggtcgggagcacgacctgccggcgctcggcaaaatgttcagccagtcgccgccggtggcgctcgatcagcgctttttcggcgacttcattcttgatgctgaggcccgcttcgccgatgtggcgcaaatctacggtctcgacggcggtgaggagttccgcgagcatcagcagtcgctcggggaagtggtgcagcagctgctgggcgccgcgccggtggtgggcgaccaggtggagttcgccgggatggtgtggacggtagctgaaaaagagaacgatcacgtgctgaaggttggggtgcgggtcgcggaagacgaggcggagtgatccgccccggaataagttacagggtcacaactggcacccgcggcgccagggcgcacatcagctcatagccgacggtgccgctgctggccgccacgtcgtcgattttaatctctttgccccacagctcgaccggcgcgccgatcccggcctgcggacaaggcgttaaatcgaccgccagcatatccatcgatacgcgtcccacggtagtggtgcgtacgccatccaccagcaccggcgtgccgctcggcgccacccgcggatagccatcggcatagccgcaggcgacgatgccgatccgctgctcctggctggtgcggtacaggccgccatagccaatcgcctcgccggggcgcaggttctgcacgccgatgatttcgctgcgcagcgtcatgaccggcttcagcccggtgttggcgatgtcctgccactgcccggaaggcgacgcgccatacagcacgatgcctggacgaacccagtcaaaatgcgcttccggatgccagagggtcgccgccgagttggccagcgagcgcgggcaatccagcccctccgccgcctgttcgatacggcgcatcggctcgacaattccctgcgggttctccgcctccgcgaagtgcgacatcagcgtcatctcgccgacgttgcttatcgcccgcagctgctgccagacggtgtggacccgctcaggcataaagcccaaccggttcatgccgctgttcaccttgagatagatatccagcggcgcgcgcagcttcgcctgctgcagggccttaatctgccagttgctgtggacgctggtggttaaacgatattgatccagcaccgccagctcatcggcatggaagaagccctccagcagcaggatcgggcctttccagccctgctcgcgcagcaggatcgcctcttccaggttgagcaaggcgaaaccatccgccgcgcttaacgcactccatacgcgcgccacgccgtggccgtaggcgttggccttgaccaccgcccacaggcgcgacccgggggccgcgcgacgcactatctgtaaattctgccgcaaggccagcaggtcgatgctggccactaccggacgggtcatgcaagctccttagttgtgtgcgccgtgcaggtgctgcgggcgcgccggggtaaaaccggggctgtagcgggcaaccgccagatcgtcgtaagggatcgccggcgtgcggccggagatcagatcgctgataagctgcccggagccgcaggccatggtccagccaagcgtgccgtggccggtgttgagccacagatttttatacgctgtgcggccgaccaccggcgtgccgtccggcgtcatcggccgcaggcccgtccagaaagtcgcctgctccacgtggccgccgcgcgggaacagatcgcgcaccaccatctccagggtttcgcgacgcggctgcagcagcgctttgttaaaaccgacgatctccgccatgccgccgacccgaatgcgctgatcgaagcgggtgatggcgattttgtaagtctcatcaaggatagttgaaaccggcgcgccgtcctcctgagcgatcggaatagtcaatgagtagcctttcagcgggtagaccggtatatccaccagccctttaagcatcgccgtcgagtaggagccgaaggccatcacataggcgtcgcccttgataatctcatcgccgcatttcaccccggcaatgcgatcgccctcgtgcagcagcgcatccactgcggtgttgaagcggaaggtcacgccggcctgttccgccattgccgccaaacgggtggtaaacagctggcagtcgccggtttcatcatttggcaggcgcaggccgccggtcagtttgtggctgacctccgccagcgccggctccacctccgccaaccgcttcgcttccagcagctgatacggcacgccggcgtcctccagcaccgcgatgtcgcgggtggcattttcatactgtttggcggtacggaacagctgcagcgtcccgccctggcgcccttcatactgaatgccggtggtgtcgcgcagcgccttcaggcagtcgcggctgtactccgccaggcgcaccatacggcctttgttctccatatagtggcgggtgtcgcagttgcgcagcatctgccacatccacttcaactggaacgaggtgccgtcaagaccgatcgccagcggcgcatggcgctgaaacatccatttgatcgccttcagcggcacccccggcgccgcccagggcgccgcatagccgggagaaatctgcccggcgttggccgcgctggtctcctctgccggaccgggctgacggtcgatgaccgtcacgtcatgacccgcctgactcaaataccacgcgctggctaccccaaccaccccacttcccagtatgacgacacgcatagcgactccgtaacagttaaagaacaatcatctaattacaaattgataactcagttgaaaatattattcaacatacgctttatttatggtgacttaactcacagcaaaccgcaccagccctgcgctgtgagatttacgatctcatgctgcgctttatttttacccagcattaaattctgcaaataaggcaaaaaaacggctttgagatggggaaatcgcgaagaaaagcgattggcgtacagcacagtttgctgcaccgtgttctatgcttgtttagaggttttccgttcagagaaaaccaacaacaacgagggcgcgctaatggctacgattgactccatgaacagggacaccacccgtttaagcgatggacccgactggacgttcgagttactggaaacctacctggccgaagtggaccgggtcgccaagctctatcgtcttgacacctacccgcaccagatcgaagtcattacttccgagcagatgatggacgcctactccagcgtcggcatgcccatcaactatccgcactggtcgtttggcaaaaaatttattgagaccgagcaggcctataagcacggtcagcagggtctggcgtatgagatagtcatcaactccaacccctgtatcgcctacctgatggaggaaaacaccatcaccatgcaggcgctggtgatggcccatgcctgctacgggcataactcgttttttaaaaataactatctgtttcgcagctggaccgacgccagctcgatcatcgactatctgatctttgcccgtaagtacatcaccgagtgcgaagagcgctatggcgtcgacgaagtagagaaactgctcgactcctgccacgcgctgatgaactacggcgtcgaccgctataaacgtccgcaaaaaatctctctgcaggaggagaaagcgcggcagaaaagccgggaagagtatctgcaaagccaggtgaatatgctgtggcgcaccctgccgaagcgcgaagaggaaaaagcgattgaatccgctcgtcgctacccttccgaaccgcaggagaacctgctgtactttatggagaagaacgccccgctgctcgaaccgtggcagcgcgagatcctgcgcatcgtgcgtaaagtcagccagtatttctacccgcagaaacagacccaggtgatgaacgaggggtgggccaccttctggcactacaccatcctcaaccatctctacgatgaagggaaagtgactgagcgctttatgctggagtttctccacagccataccaacgtggtgttccagccgccgtacaacagtccgtggtacagcgggattaacccctacgcgctgggcttcgccatgttccaggacatcaagcgcatctgtcagtcgcccacggaagaggataagtactggtttcccgatatcgccggttctgactggctggaaacgctgcatttcgccatgcgcgactttaaggatgaaagctttatcagtcagttcctgtcgccgaagatcatgcgcgatttccgcttctttaccgtgctcgacgacgatcacaacaattatctggagatctcggcgattcacaacgaagagggttatcgcgagatccgcaataagctctccgcgcagtataacctcagcaatcttgagccgaacatccaggtgtggaacgttgacctgcgcggcgaccgatcgctgaccttgcgctatgtgccgcacaaccgcgtcccgctggacaaaggccggcgcgaagtgctgaagcatgtgcatcgtctgtgggggttcgatgtgctgctggagcagcagaacgccgacggcagcattgagctgttggaccgctgcccggcgcggccgaacgcgctatagcattgcggggcgagtaaaataacaaagggggccattggcccccttgttctgtatatcgatcgcgaaaagcccgcttaacgcatattcatggctaaatcaccgggcagcgatttctgcatccggtgccagatctcgccgctgtcatggccgtagcgacgaaccagctcgtaaacctggtcatgcaggccagcctcacacactttcgccagctgatgatagaaaccgagcgccaggctgcgcgcttccgggctggagaaatagtggcggccgatgcgggtatacaaccccttcatgccgttgaggatcagaccgtagatcgggttgccggaggcaaacgccagaccacggaaaatattataatcaagctcggcgaaggcgtcggcgtgatcctccacctcccgggcgctgtccaggaccgccagcgctttatccggatgctggcgaaacgcggtgcggataaaaatcgtggaaatgttggtgcgcacggagagcagattatcaatcaactgcggtacgctgtcgtgatcgaggcgcgccagcgtttcgaggatattcaggcctgaggtttcccaaaagttattcactttagtgggcttaccatgctgaatggtcagccagccgtcacgggccagacgctgcaatacttcgcgcagggttgtgcgggtgacaccgatcagctcagaaagctcgcgttcagcggggagaatcgatccgggagggaagcggttattccagatactctcaatgatgtactcttccgcgaaacccgcagggctctgcgccttaatgaccatagtaagatttccattacacagcgttacaattgcactcatcataccagagccgctatagcgcagatagcatggcaagtgaattaaaaagggatcgccgtttcattttccgcttttactttgcgcttttccttatcttcacaaaccgccagcacggcgcgaagaaagttgcttctcattttgctcaactggtactcttgccaatcgttatgcacaaaaccatgcactcattgacggggaaggattctgtcgtggaaatttcttatggccgcgcgctgtggcgcaattttcttggccagtcgccggactggtacaagctggcattaatcattttcttaatcgtaaatccgctggtgttcgccgtggcgccgtttgtcgccggctggctgctggtggtcgagtttatctttaccctcgccatggcgctgaagtgctatccgctgctgccgggtggtctgctggctatcgaggcgctgctgatcggcatgaccagcccggcgcacgtgcgggacgagatcgccggcaatctggaggtgctgctcctgctgatgttcatggtggcgggtatctactttatgaaacagcttttgctgttcgtgtttacgcgcctgctgctggggatccgcagcaaaatgctgctatcgctgtccttctgcctggcggccgccttcctctcggcctttctcgatgcgctgacggtggtggcggtagtgatcagcgtcgccgtcgggttctacggcatctatcaccgcgtcgcctcggcgcgcccggacgatagcgacctgctcgatgacagccatatcgagcagcactaccgtgaagtgctggagcagttccgcggctttctgcgcagcctgatgatgcacgccggcgtcgggaccgcgctcggcggcgtcatgaccatggtcggcgagccgcaaaacctgattatcgccaaagccgcgggctggcattttggcgagttctttcttcgcatggcgcccgtgaccctgccggtgatggtctgcggtctgttaacctgtctgctggtcgaaaagtatcgcctgtttggctacggcgaaccgctaccgccgacggtgcgcaaggtgctgcaggagtttgacgatcgcagccgcgcccagcgcagccgtcaggagcgactgcggctgattgcccaggcgctcattggcgtttggctgatcgtggccctggcttttcacctggctgaggtcggcctgattggcctgtcggtgatcatcctcgccaccacctttaccggcgttaccgatgagcacgccattggcaaggcgttcaccgaggcgctgccctttaccgcgctgctgacggtcttcttctccatcgtcgcggttatcatcgatcagcagctgttcacgccggtgatcgagtttgtcctgcaggcctcgccgcacgcgcagctgtcgctgttttatctgttcaacggcctgctgtcgtccatttcggataacgtgtttgtcggcacggtctacatcaacgaagcgaaagcggcgctcgaacatggcgccatcagcctgccccagtttgagatgctggcggtagcgatcaacaccggcaccaacctgccctcggtggccaccccgaacggccaggcggcgtttctcttcctgctgacttccgccctggcgccgcttattaggctctcctatggccgtatggtgtggatggcgctgccctacaccatcgtactgacgctggtcggcctgttatgcgtcgagttcaccctgatgccagtcaccgactggctgctggcgcacggctggctggtgacgcccaccctgccctgagtcagtttttgcccgggttcgcccgggcgcatcaataacccgttacggaatattttccgccgcgcctctggcgtcggttcggttttcgtttacactgccatgatttagcatcttccagggaaatgattatgttgcaatatttaaaccagtgctcaagaggacgcggtgcctggctcctgatggcgttgaccgcttttattctcgaacttgtcgcgctgtggttccagcacgtgatgctgctgcagccgtgtgtcatgtgtatttacgaacgctgcgcgctgttcggcatcatgggcgcgggactggtgggcgccatcgcccccaaaacgccgctgcgctatgtcgccatggcaatctggttgtacagcgcgatacgcggactacagctggcgtgggagcatacgatgatccagctgcacccttcaccgttccagacctgcgatttcgccgcccgcttcccaacctggctgccgctggataaatggctgccgcaggttttcgttgcgtccggagactgttcagtacgtcagtggcagttcctgtcgctggagatgccgcaatggctggtggggattttcgccgcctatctgctggtcgctattctggtgatcgttgctcagcctttcaaagcgaaaaaacgcgatctgtttggtcgttaagccgcggcgagtacagcccacaatgaaacgccctgcggggcgtttttttatgcctcctgcgcatcgctgaatcgtttcatgtctatggttgaccacagccaccaaaaggcgcatattaaatacatcttttaaaaccccacaggagctcacatgtcatctttactgatccccgcagactggaaagttaaacgctccaccccattctttaccaaagagaatgtccctgccgccctgctgagccaccacaacaccgcggctggcgtcttcggccagctgtgcgtcatggagggaacggtgacctattacggttttgccaatgaacaggcgacggagccggagaaaaaagtcgtgattcatgccgggcagtttgctaccagtccgccgcagtactggcaccgcgtcgaactcagtgacgacgcccgcttcaatattcacttctgggtggcggaagaaaccgacggtgaaaacgggctgttccacgcgaagaaagcgtgacggcgcttagcgcgccctgtcaggcagattaaggatatggtcctgccagtcgaccaccgtggactcaggcaccgcaatatggcgaacggagatgcgttcgccgtgcatcgccgcttttgagccagtcagcagcgggtgccaggccggcagaggcttgccttccgccagcaggcgataggcacaggtcggcggcagccattcgaaggtcggcagattttcgcgggtaagcttgatgcagtccggctcatactcaaagcgacgcgcgtagttacgacactggcaggttttgatattgagctgacgacaggcgacgttggtgaagtagatctcgtcagtgtcttcatccatcagcttgtgcaggcagcactggccgcagccgtcacacagcgattcccactccgcgtcgctcatgtcatccagtgttttttgttgccagaaaggttgttcgctcatcggagtgtccgtcgttgccagttaagggtgcaccttataaccagtctggcacgccgatgcaagttttgccgccccaaaaggcggcaaatagcgcttacagcacgcgggtagtgagcgccaggccgttgaagccgacctccagctcgtcaccgctgtgcagcggccccacgccttccggggtgccggtgaggatcacatccccggctttgagggtaaagaagcgcgacatataggcgatcagcggcacaatcttatggatcatgtcggcagtggtgccctgctggcgcacttcgccattaatcttcaggcttaacgacgtattctgcgggtcgccgtggaactcagcggccgggataaagccggagatcggacaggcgttatcgaagcctttggccttctcccagggttgtcccgcttttttcattttcgcctgcaggtcgcgcagcgtgagatccagcgcgacaccatagccggcaatccctttcagcacatgctcttccgtcgcctgacgcagcgtgctgccgataagcaccgccagctcgacttcgtgatgcaccgagcccagcccctcaggaagcaccaacggctgacgaagatcgcacagcgcagtctcaggtttaataaacagcaccggctcttccggcgtcgcactgcccatttccttgatgtgtttcgcataattactgccgacgcacactactttgcttactggataatccagaagcgcaccctgccagttatgatgttggtacattattttccctcgtgggttaatcggattgtttcccctgttccgccaggtgtttctttagtagattttcagacggcggaggcagttgcaggtaatagccctgttcgcttaacgcctgtttcactttttccagatcggcgttaaccagttttttgcgcccatccagcggcagcagcatcgccatttgcggcgtgccaaagctgcgcattagctcgtcaggaacgcgcgagaaatcgtcctttttttcgacgtataaataggtttgttcacgtttagtacttcgatagatcacacaaaacatagttttactcggaattagacccgtggtcacttgcctcaatatatgagtgactataacatgccttttagtcttcggaatatcaccgcacttcggcggttgataaacagcaaattgagtaaggccaggatgtcaaatacgccaatcgaacttaaaggcagtagcttcacgttatctgtcgttcatttgcacgatgcaaatcccgaggttattcgtcaggcgttagaagacaaaatcgcccaggctcccgcctttttacgtcatgctccggtggtggtgaatatcgccagcatcgaggaggaggtagaatggcgcgccatcaacgaggctatcgccgcgaccggtttacgtattatgggcgttagcggatgcaaaattccgcgcctgaaaaccgaaatcgaccgcgccggcatcccgttattaaccgaagggaaagaaaaagcctctcgtccggcaccgtccgaacccaccccgccgccgccagttgctagtcagatcacaaaaacgcgtttgattgatcagccggtacgttccggtcagcgcatttatgcgccacactgtgatcttattgttacaaatcatgtgagtgccggtgcggaacttatcgctgacggaaatatccatgtatatggcatgatgcgaggacgcgcgctggcaggcgccggtggcgacagagacgcccagatattttgtacccaccttgcggcggagctggtctccatcgccggggaatattggctgagcgataacatcccggccgaattttatggcaaagcggcgcgcctgcgtttaggtgaaagcgctttggcaattcaaccgttaaattaatccctttttaacaaggaatttctatggcacgcattattgttgtgacttcgggtaaagggggcgttggcaagaccacctccagcgcggccatcgctacaggtttggcccagaagggaaagaaaaccgtcgttatcgacttcgacatcggcctgcgtaacctcgacctgattatgggctgcgaacgtcgcgtcgtttatgatttcgtcaacgtcattcagggcgatgccacactgaaccaggcgctgattaaagataagcgcacggaaaatctctacattctcccggcttcccagacccgggataaagacgctctgactcgcgaaggcgtcgacaaggttctcgaagaactgaagaaaatggaattcgatttcatcgtctgtgattccccggcaggcattgaaaccggtgcgctgatggcgctttactttgctgatgaagccatcatcaccactaacccggaagtctcctccgttcgcgactccgaccgtatccttggcattctcgcctctaaatcccgccgcgcggaaaatggcgaagagccaatcaaagagcatctgctgctgacccgctacaatccaggccgcgttaataaaggcgatatgctgagcatggaagacgtgctggaaattctgcgcatcaacctggtaggcgtgatcccggaagaccagtcagtcctgcgcgcatccaaccagggtgagccggtgatcctcgatgccgcctcggacgcaggcaaagcctatgccgataccgttgaacgtctgctcggagaagaacgccctttccgcttcattgaagaagagaagaaaggattcctcaaacgcctgttcggaggataaattatggctttactcgacttttttctctcgcgaaaaaagaacacggctaatattgcgaaagaacgcctgcaaatcatcgtcgccgagcgccgccgcggagacgcggagccgcattacctgccgcagttacgcaaagatatcctggaagtgatctgtaaatacgtacagatcgacccggagatggtcagcgtgcagctggagcagcgggacggggatatatccattcttgagctgaacgtgaccctacccgaaacggaagagtcgaaatcctgacctttcgcgccatcgcgaaaaaaaccggctacgccacgcgccgccggttttttaatgctctgaacctggccgcgaactagcgcggatagtcgtttaacagcctcttcagccgctcggccatcagctccccgcgccaaccggaaatcagctcaggttcaccggcttgcgttttcagctgccagtgccagttcagcagctggttgatctgccgacgcgacgccagcagctccgcgcttacgcccttctccgtgctcacttcctgcaccagcgctttaatatctttaaaggctttgcggtagcccggcatgtcgatcaggttctgcagcggcgccggcagggccgactccggcagcgcctgcgctttttcgaccaggctaatcagcgttttgccgtggaagcgaatttcgctaccggataacccgaggctgtcgagctcgcccaggctggtgggcatatagcgcgccacgctccacagatgctcttcccgcaccacaaagtttaccgccaggtcgcgctcgcgcgctttgcgcaggcgccactccgccaacagctgcagacaacccagctggcgggtacgcagctgccaggcgttgccgatatcgcgccaggcctcggccgggtcgaccacctcctgacgacgctgctgcatcacgcggcactcgtcgagcgccgccggcagccagccagcgcgatcggtctccgccattaactggctggcgatcggcagcagataccagacgtcggccgcggcatattcacactgacgctcagtcagcgggcgcgccagccagtcggtgcgggattcgcttttatccagcgctaccccggaatactcttccaccatcgaggcgaagccccaggacattgggcggccgcagaaggccgccaggatctgggtgtcaatcagcggctgcggcatcaggttaaatgcattaaggaagacttctaaatcttcgctgccggcatgcaggtatttagtcacatcctggttgagcagcaggtcgcgcatcggcgcccagtcgttaatcgtcaagggatcgatcagagagacctgctggccgtcgaacagctgcagcaggcccagctgcgggtaataggtgcgggtgcggacaaattccgtatccagagcgacggcggaggccgtgcttgccgcttcgcagacagcgcgcaggccatcgtcggtggtgatcatctgatagttcaaagcatactctcttaacttgcgcccataaaaaacgccggcgtagccggcgtcaggcgactcattcgttacttagcctttattgtccactttagcgcgcgcttcgtcacgcagttctcgccgcaaaattttcccgacgttggatttcggcagttcatcacggaattccaccagcttcggcaccttgtatccggtcaaatggcgacggcagaacgtaatcagcgcctcttcggttaacgcagcatctttcttgactacgaaaatcttcaccgcttcgccgctgctgcctgacggcacgccgatggccgccacttccagcaccccgctatgctgcatgaccacatcttcgatttcgttcggatagacgttaaaacccgacaccaggatcatatcttttttgcgatcgacgatgcgcaggaacccctcttcatccatcaccgcgatatccccggtgtgcagccagccgtctttgataatctcatccgtcgcgtcagggcgctgccagtagcccagcatcacctgcggccctttaatacagagctcgcccggctgacccggcgccacttcgttatcatcatcatccaccagtttggcttcggtggagggcaccggcaggccaatgctgccgctgtggtagtcaatatcgtgcgggttaacgctgaccagcggagaacactctgtcaggccgtagccctccagcagatattgcccggtcagttttacccagcgctcggccaccgcctgctgcaccggcatcccaccgccggcggacaaatgcagcgaggagaaatcaagctgctggaactctttgttgttcagcaaggcgttgaacagggtattgaccccggtcatggcggtaaaaggatacttcgccagctccttcaccagcccggggatatcgcgtgggttggtgatcagcaaattttgcccgcccagttcgataaacagcaggcagttcatggtcagggcgaaaatgtgatacagcggcagcgcggtcaccacgaactctttgccgcgatgcagcagcgggccgtaggtggcattgacctgctcgaggttagccagcatattgcggtgggtgagcatcgcacctttggccacgccggtggtgcccccggtgtactgcagaaacgccagatcttccgcaacgatctccggcttgacgtactgcatgcgatagccgtgctgcaacgcgctgcgaaacgagatggcgtccggcaggtggtacttcggcaccaggcgcttaatgtacttgaccacaaagttcaccagcgtgcctttggcggtggaaagctggtcgcccatgcgcgtcaggatcacatgctggacctgagttttcgccaccactttttccagggtatgggcaaagttggagactatgacgatcgccgccgcgccgctgtcgttgagctgatgctccagttcgcgcggggtatataaggggttgacgttaaccacgatcatcccggcgcgcaggatgccaaacagagccaccggatactgcagcaggttaggcatcatcagggccacgcgatcgcccttctgtaaccccaacccctcctgaagataagcggcgaaggcgcgactacgctcctccagcttacggtaggtcatcacttcacccatattgataaacgccggttggtcggcgtaacgggtggtggcatgttcaaacagttcaaccagggattgatagcggtcaggatttatctccgccggaacatctgcgggataacggtttagccaaacctttttcactgcatcacctctgaaatagttattcgtcgtcatcacagcccctggataatacattttgttaacattatattaactcagcgtaccagtttattaattaggcaatgagcaggttgcgaagcgcgtcactattttttttcttattcgactgaaaacaaagaaacagcggaccggccgctgtttctttgaactaacataaacaacaaaatcattcggttacaacgtttctcacctcagcagggccgggattgtaccagccccagccgccatagccgtagccccaggggcgcggacccagcatccacgggtcgataggttgcggaggcatcaccacctgctgcactacgttccagcgcttgtagccggtggcgttcatcagcataaatttatacggcgtgctgcccaccttgccgtcaaccaccccggcgatcggtccgaccacggtcactagttgaccgcggaaatccaccggatcgaggaagccattgacgtcagcaaaaatccttccgcgggacggctcgcccagcactggccgcgcgccgctgtccagcggtacggtggcgatttctaagcgggttttcccctgctggttttgcacattgaccaccttaccgccaaagcgcgcttcctggccaacgtacagctgcggggcgttcatcacccgcaccaaatcctgctgcggcgtcgggctggtgcctttgatggcatccggcactgacacgcagccgcttagcgcaacggcaaccgccgcggctaacagccagcgaacgccctgtttttgacccgccatgatgcgactccttttctcagtcttcttgttactgagattcactcgcggcatggaagtttcttccacgccacctcgtttcgcaaataaaccggctccgctttctccacggccacggttttccccgccgccagcaggtaacaggctaacggcagcatatcctccgccgccggcaattcaatttcgccgctgcttaaggtcagtccgctcgctttcgccagatccggccacgcctgccatccggtgccgacggtggcccattcgccggaaagctgtgccagtcgttcggctaccgcgtccggtttgagcaccgcttccgtctcttcgccatgccagacgccctgctcgtcgcgctggtactcggcccagtagacttcgcccatacgcgcatcaatggccgccagcacacgggtggcgccggttttgcgccaggcgccctgcgccatggtggccagcgtggaaacgccaatcattggcagttcggcgcccagcgccagcccctgagcgataccgatgccgatgcgcacgccggtaaagctgcccggaccgcggccaaaggccagagcgtccagctcgctcagcgtggtgccgctctcggtgaggacctcctgcaccagcggcaggatacgttgggtatgttcgcggggacaaatttcgaaatgagcactaagggtgccatcattccacagagccgcggagcaggcctctgtggcggtatcgatagccaaaattcgcatgggtggtcacgctctcgttacatagttcaggccttcaggcagcctgatttccggcaaacggccaacccgccgccatgccgcccgaagtctattgggaaccgctaattaacaaaatggcgcgcagcttaacacattttagtgcggattaccttgccggcggtacggcgagaaagcgcaccgcccgacggatatcgcgggttcgcggcgccggcggcagactggccaggaacaccgcgccgtaggggcgcatcaccagccggttgtcgcagatcaccagcaccccgcggtcgtcgatatcgcggatcaggcgacccaccccctgcttgagggtgatcaccgcatccgggagctgcacttcatcgaagggatcgccgccgcgcagccggcaatcttccatccgcgcttttagcagcggatcgtccggcgaggtgaacggtagcttatcgataatcaccagcgacagcgcgtcgccgcgcacatcgactccctcccagaagctgctggtagccaccagcagcgcgttgccggcgctgacgaactgctgcagcagctggcctttgctggtctcgccctgcagcagcaccggtagcgtcatggtggcgcggaactgctcagccagatcgcgcatcatggcgtgcgaggtgcacaacataaagcagcgaccatcgttggcctcgatcagcggcttgagcatcgccgccaggtgtcgcgccgcgccgggctggttcggcaggggtaggttgcgcggcacgcagagcagcgcctggtgctgatagtcaaagggactcggcagcagtagagtctgcgcctcgtcgatccccagccgggcggtaaagtgatgcagatcgtcgttcaccgacagcgtcgccgaggtaaagatccagctccccgacttctgcgccatcacctctttaaacttctcggccacggtcagcggcgtcagcgcgagagtaaagtggcgcgaggtacactcataccagtagctgtagcccggctggttgatctctttcaaccgcttcaggcgcccgcgatagagggtggcgcgctcaaaagcggcgtcgagcagcgccgagcgacccagcgaaagtttggcgacgtcatagcatagctcgagcgcgtcatcgagcagcagcagcgctcgctgaatgtggctgtccgccagcagctcgcgcagattgccgcggtagcccgggtctcccagctgcaggcggaaatcctgcgcgctttgcgccaggcggtcggcgcatttttgcagctgctgagtgtctttcagttcggtgcggtaggcaatggtgatgtctttcgccaggtccagcagctggcggctggagagcgactggccaaagtactgactggcgatatccggcagctgatgggcttcatcgaagatcatcacttccgcctcggggatcagctcggcaaagccgctctctttgaccaccatatcggccagaaacaggtgatggttgaccaccaccacgtcggcgtccatcgcttttttacgcgccttcaccacgaagcaatctttatacagtgggcagtcgctaccgagacagttatcgttggtgctggtgaccagcggccaggcctgagagtcttccgcgacgctggcgcaggtgctgatatcgccatcctgggtttgattcgaccaggagcgcaggaggatcacatcgctgagggtttgcaccggcagatcgccgcccgccagcgcctgctgctcaagacgttcgagacacaggtagttggagcgccctttgagcagcgccagtttcccggtgaatttgagcgctttggcgacggtgggcagatcgcggctgtaaagctgatcctgcagcgctttcgagccggtggagataatcaccttttttttcgcccgcagcgcaggcgccaggtaagcgtaggttttaccggttccggtccccgcttccaccaccagcggccgggaggcctcaatcgcttcgctgaccgccaccgccatctggcgctgcggctcgcgcggtttaaatcccggtatggctttggctagctggccgtctgctgcaaaatcgtcgatcacattgccccctggttatttggacagtgattatgtcagggaggacggcgtttcgccagtccgggtagtgacgcgagcggcacattatggcagtcttgccgcagccgaatggaatgcttaaagaggaaaaagcaatgacaattacgcgtattgatgccgaagcccgttggtcagacgtggtgatccacaaccagaccctgtactacaccggcgtgccggcaaatctcgatgccgacgctttcgagcagaccgccaataccctggcgcagattgacgcggtgctggaaaaacagggcagcgacaagtcgcgtattcttgacgccaccatcttcctcgccgataaaagcgactttgcggcgatgaataaagcctgggacgcgtgggtggtggctggtcacgccccggtgcgctgcacggtggaagcgacgctgatgaacccgcagtataaagttgagatcaaaattatcgccgcggtgtaattactcgtcctcatcctcatcttcaaagcgcgcgacgatctgctcgccggtatgcgttgcgcgcagctcttccgccaccagggcaatcgcctggccgctgcttatcccctgagccattagctcatggatacgttcgaccgctttttgctgttgctcgtggctcagcgaaggtaaacctgcaaacatcttttactcctgctacattgtggggcgtaattatttcacgccgtccccgactacgccagaggggcggcaacgttcaggatcgagaaagatgttgtcccccgcgattattaccctgccctggcgcccggatgcggccgaacactattttgcgccgttaagcgccctgccctgggcgatgctgctgcattccggctttgccgaccatccgcataaccgctttgatattctggtggctgccccgcgcgccacgctactgacgcgcgatgaacagacgtgggtcgacgacggcgaaaccgttgttgtctcagcggaagatccgctgcagctcctgcagcagcagttggatcgtcagccgttcacgccgcaaccccatgacgatctgccgtttctcggcggcgcgctgggattattcggttacgacctgggccgtcgctttgagcgtctcccttcgcacgcgcaggccgatatcgcgctggcggatatggcggtggggatctatgactgggcgcttatcgtcgaccaccagcgccaacagatatcgctgctcagctatgacgacccgcagcagcgtctacagtggctggaggcgcaaacgccgacgccgggtgaaaccttcgccctgacctctgcctggcagtcaaatatgagccgccagcagtacggcgaaaaatttcgccaggtacaggcctatctgcacagcggcgactgctatcaggtcaacctcgcccagcgttttcaggccagctacgtcggtgatgaatggcaggccttccgccagctgaacgccgtcaaccgcgccccctttagcgcctttattcgcctcgatgaaggggcgattttaagcctgtcgccggagcgctttatccagctgcgccagggggagatccagacgcggccgataaaaggcaccctgccgcggctcgattcgccgctggcagatgcgcagcaggctgagaagctggcgaattcgccgaaagatcgcgccgagaatttaatgattgtcgacctgatgcgcaacgacatcggccgcgtcgccgtcccgggcagcgtccgggtccccgagctgttcgtggtggagccgttcccggcggtccatcatctggtcagcaccatcaccgcccgcctgccaatgacgctgcacgccagcgacctgctgcgcgccgcctttcccggcggctcgatcaccggcgcgccgaaagtgcgggcgatggagattatcgatgaactggagccccaacgacgcaacgcctggtgtgggagcattggctacctgagctattgcggcaatatggataccagcatcaccattcgcaccctgacggcatggcagggacagctgtactgctccgccggcggcggaattgtggcggatagcgaggaagcggcggaatatcaggaaacttttgataaagttaatcgtatcctgcagcaactggagaactagaccatggcggatcgcgcccttaatctggatgattttctgtcccgctttcagcttctgcgcccgcagccttcgcgccatgcgctcaatcagcggcaggcggcggtgctggtgccgatcgtgcgccggccgcagcccggcctgctgctgacccagcgttcgccgctgctgcgcaagcacgccggccaggtcgcctttcccggcggcgcagtagataataccgacgcgacgcttatcgccgccgccctgcgcgaagctcaggaagaggtggcgatcccgccggaggcggtcgaggtgatcggcgtcctgccgccggtggacagcgtcaccggctttcaggtgacgccggtggtgggcattattcccccggatctgcactatcacgccagccaggacgaagtctccgcggtatttgaaatgccgctcgccgaagccctgcgccttgggcgctaccatccgctcgatatccaccgccggggcaacgaccaccgcgtctggctctcctggtaccagcattattttgtctggggaatgaccgccgggatcattcgcgagctggcgctgcaaattggcgcacgtccttagctatactgataatgagagggcgctctcattattagtaaaatcgcggttagccattagtttaattcatgtgaatagttgaactgacagggcgcttccctcttacactatgcgcagttattacatcgttaccgcacccgcggtaaccctgtcaggagtattatcgtgattagtctattcgacatgttcaaggtggggattggtccctcatcttcccacactgttggcccgatgaaggccggaaaacagttcgtcgatgacctggtcgaaaaaggattgcttaatgcagtgactcgtgtggcggttgacgtctacggttcactgtcattaaccggcaaaggccaccatacggacatcgccattatcatgggactggcgggcaatcagcccgatacggtcgatattgacgcgatcccggcttttatccgtgacgtcgaagcgcgcggtcgtctgctgctggccaacggccagcacgaggtcgacttcccggcggatgacggcatgcgttttcgtagcgacaacctgccgctgcacgaaaacggcatgaccattcacgcctgggccggcgagaaagagatctactgcaagacctactactcgatcggcggcggctttattgtcgacaaagagcacttcggcaaggaaaacgccaacgaactgcaggtgccctacccatttaaatcggcgcaggaaatgctggcctactgcaaagagactggcctgtcgctctccgggatggtgatgcagaacgagttggctctgcacagcaaaaaagagatcgaggattatttcgccaacgtctggcagaccatgcgcgcctgtatcgaccgcgggatgaacaccgagggcgtgctgcctggcccgctgcgcgtaccgcgtcgcgcctcggcgctgcgtcgtctgctggtggccagcgataagctctccagcgatccaatgaacgttgttgactgggtcaatatgttcgcgctggcggtcaatgaagagaacgccgccggcggtcgcgtggtaaccgcgccgaccaacggcgcctgcggcatcgttccggcggtactcgcctattacgatcactttatcgagtccgtcagcccggagatctatattcgctactttatggcctgcggggcgatcggcgcgctgtataagatgaatgcgtccatttccggcgcggaagtcggctgtcagggcgaggtgggcgtcgcctgctcgatggcggcggcgggactggctgaactgctcggcgccagcccggaacaggtttgcgtggcagcggagatcggcatggaacacaacctcggcctgacctgtgatccggtcgccggtcaggtgcaggtgccatgcattgaacgtaacgccatcgcctccgtcaaggcgatcaacgccgcgcgaatggcgatgcgccgcaccagcgaaccgcgcgtctcgctcgataaggtgatcgagaccatgtatgaaaccggtaaagacatgaacgccaagtaccgcgaaacctcgcgcggcggcctggcgattaaagttcagtgtgactaaacttttcgtgcccctctgcgcctgcaaagcgcgcagggggttaaccctggtgactgaaatctccctgatgcgccttcaacggcgcattttcttttttctatacctggcgatattctgccactacacttgctctataaaataagccacgcttaaccactcgtcctgtcgacagggtgtcgcacatgcagactgcacaaaaagtcattacggcctatcgtcacaaacgcattattgtctgcctgctggtagccctggcgaccctgggcgccacattagccatccgatttatttcgcagcgcagcgtaaatgaagattatattcgcacggccgccagccaacgggtggcggcgctcaatgacatcttgcgcccgctaagcgcgcagcgagccaccctgctccctctggtgggcaaaccctgccctgatatccatctgacgctgcgcaaaatggcggcctcgttgcaaaccattcgttccgtcgccctcgtcacgtcaggtatcgtttactgttccagtatttttggcccgcgacaggcagacttacatcgcctgcagcccgcgcttcctgcgccccgccctctgctactcttctcgaacgacagctccttgctcaaaggctcgccggtactgatccaatggtatccagccgcggagagcggcctggacggcgtgatgctggtggtgaatattgagctgctgggaaccttaattcttaatgaaaaatcggccctgatcagcgacgtcagcctgcaggttggcgatcgttattttagcagccgccatgggcttctcgaaaaagcgcatgtcccgcagggcacggtgatttatcgccagcgctctacggagtttccgtttactgtcaatattaacggccctggcgcctcggcgattgcgcttgaggagctgcccggcgagctgccgctggcgctgatttttagcctgctaatgaccggcatcgcctggctggccaccgcaggcagaatgagtttctcgcgggaaataagccttggcatttcggcccgggagtttgccctctggtgccagccgctgcaggatgcgcgcagcggccgctgctgcggggtggagatcctgctgcgctggaataatccccgccgtgggacgatttcgccggaggtatttatccccatcgccgaaggcaataatctgatcatccctctcacccgctatgtgattgccgaaaccgctcgccgcctggacgcttttcctcgcgaccgccattttcacatcgcgatcaatgtcgccgcgcgccatttcgctaacggactcctgctgcgcgacctgcacaattactggttcagcgtggatccggtgcagcagctggtggtcgagctaaccgaacgcgatgtcctgcaggatggcgaccagcatatggccgaacatctgcactttaagggcgtacagctggcgatcgatgattttggtaccggcaatacttcgctctcatggctggaaaagctgcgcccggatgttttgaagatcgaccgctcgttcaccagctcggtcggcatagatagcgtgaacgcgacggtgacagatattattatcgccctcgccaaccgcctgcatattgttaccgttgccgaaggggtggagacgctggagcaggaaaactacctgcgtagccacggcgtcgatgtgctgcaggggttttattatgcgcggccgatgccggtggaggcgttcccggcgtggctggccagcagggaggagagtgagagtgagagtgagagtgagagcgagacgacagaataactcgccggccgcagcggccggcgagcctggcgattactcttcttcgtcgctcggcggacgagtgaccaccgcgcgcaccagatcgacccggtaatcattcgcttccactacggtaaaatgcagcggcggaagcgacacgacgtcgccaatgcgcgggatatgaccattggcggagatcaccagcccggcaacggtggcaatatcctcatcgtcattgatcagtggatccagccccagcgcctgctgcagcgcatgcaggtcggtcgaccccttaataagccagccatcgccatcgatgacaatctctggcgtctcatcagcgtccgggaattcaccggcgatggcttcaaggacgtccagcggcgtgaccagcccctgcaccacgccaaattcattagttacgatgacgaagctgccgcgcgcccgacgcaggaccccgagcagattgatcgggtccagcgtttccggaacgacaattgccggggaggcagaagccagcgccgcgacgttttcccccgactccagggccaccagcatctctttcgcccgcacgataccaatgatttcatccagctctccgcggcagaccgggaagaggctgtgcggcgacgacagcagttgacgacgaatttcatcttcactctgctcagcgtcgacccagctgatttctccgcgcggggtcatgatgctgcgcagggagcgctgggccagggtcagcacgccgttaatcatgtagcgctcttcttccgcaaaggcgccctcaggaacgggcaccgcggctggactgtctgcgtcatggctgacggaggcctgtttgcggccgcccatcaggcgcaggatggcatccgcggtccgagcgcgcagcggcagcgtcgactggtggcgaacaaagttacggcgcgccacctggttaaagaactcgataatgatcgagaaaccgatcgccgcgtacagataccctttcggaatatggaagccaaacccttccgccaccaggctcaggccaatcatcaacaggaagctcagacagagcacgaccaccgtcgggtgctggttgacaaagcgcgtcaacggcttggaggccagcagcatcaagatcatcgcgatcaccaccgccgccatcatcaccggcagatggttaaccatcccgaccgccgtgatcacggcgtccagggagaagacggcatccagcaccactatctgcaatactactacccagaaactggcatagcctttaccgtgaccggcatcgtgctggcggttttccagccgttcatgcagctcggttgtcgccttaaacaataagaagatcccgccgagcagcatgatgagatcgcgcccggaaaaggagaaatcggcgatggtaatcagtggtttcgtcagcgtcaccatccaggagatgaccgacagcagccccaggcgcatcaccagcgccagtgacaggccgatcagacgcgctttatcgcgctgcttcggcggcagtttgtccgccaggatggcaataaacaccaggttgtcgataccgagcacaatttccagaacgataagcgtcaacaggccggcccagattgagggatccattaacaattccatgtacgactccggtttgcggcaaggtcagtcatcgccatgccatgcaggggcgcgacaccaggtgctgaaagaaatgcgggatacgtagaggtggcaatcagatgccagaaagtgaaaagacgtcgatgacggtccatactgcgggctatgccctatactcctgagtaattaaacggaagttaaacatagcaaaatatagatcgaaattggaaataatttacctgaatttgcaataactaaggctattttttgcgctgcaaaattattcgcagacgatacgtgattaacggatcttcatcacattaattattttttcactgtctaaaataattcgcggtagtaactattttctatcttacaccctaactgaatcgattttgtcctcaagagtgattcaggatgtatcaaagcagatgatgcattcacgataataaaggaggtagcaagtgacgattgctattgtaataggcacacatggttgggctgcagaacagctgctgaaaacagcagaaatgctgttgggcgagcaggaaaacgttggctggatcgatttcgttccgggtgaaaatgccgaaacgttgatcgagaaatacaacgcccagttggcaaaactggataccagtaaaggcgtgctgtttctcgtcgatacatggggaggcagccctttcaacgctgcgagccgcattgtcgtcgataaagagcattacgaagttatcgccggcgtcaatatcccgatgctggtggaaaccttcatggcccgcgacgacgatccttcctttgatgaactggtcgccttagcggttgaaaccggcagcgaaggcgtgaaagcgcttaaagccaaaccggtggaaaaagcggcccctgcgcccgcgcctgccgcagcgccaaaagccgccgcaccggccaaacccatgggcccgaacgactacatggtaattggccttgcgcgtatagacgaccgtctgatccatggtcaggtcgccacccgctggaccaaagagaccaacgttacccgcatcatcgttgtcagtgatgaagtggccgcggataccgtgcgtaaaactctgctgacccaggttgcgccgccgggcgtcaccgctcacgtggtggatgtggccaaaatgatccgcgtctacaacaaccccaagtatgccggacagcgcgttatgctgctgtttactaacccgaccgacgttgaacgtatcgtcgagggcggcgtgaaaatcaccagcgtcaacatcggcggtatggcgttccgccagggtaaaacccaggttaacaacgcgatttcagtcgatgccaaagatattgaggcgtttaaaaagctgaacgcccgcggtatcgagctggaggcacgtaaagtgtccaccgacccgaaactgaaaatgatggatctgatcgctaaggttgataaataacccggcggatcgcgccccagttttcactttaagacttaatcaacaggagaagtacaatggagattacccttcttcagattgtgctggtgttcatcgtcgcgtgtattgcgggtatggagtcggtacttgatgaatttcagttccaccgtcccctgatcgcctgtacgctgatcggcgccgttctcggcgatatgaaaaccggtattatcatcggcggtacgctggagatgatagccctgggctggatgaacatcggtgcggcggtagcccctgatgccgcgctggcgtccattatttccaccgtcctggttattgccggccatcagagcatcggcgccggtatcgcgctggctatcccgctggcggcggcaggccaggtgctgaccatcatcgtgcgcaccatcaccgtggccttccagcacgcggcggataaagcggcggagaatggtaacctgaccgccctgtcgtggctgcacgtctcgtccctgttcctgcaggcgatgcgtatcgctatcccggccgttatcgtggcgatttccgtcggcaccagcgaagttcagggcctgctgaatgctatcccggaagtggtcaccagcggtctgaacatcgccggcggtatgatcgtggttgtcggttatgcaatggtcatcaacatgatgcgcgcaggctatctgatgccgttcttctacctcggcttcgtcaccgccgccttcaccaacttcaacctggtggccctgggtgtgattggtgcggtcatggcaatcctctacattcagctgagcccgaaatataaccgcgtcgccggtgcgccggctcaggcggctggtaacaacgatctcgataacgaactggactaacaggtgagcgaaatggttgatatgactaaaaataccaccgagaaaaaactcacacagagtgatattcgtggcgtgttcattcgttctaacctgttccagggttcatggaacttcgaacgtatgcaggcgctggggttctgcttctctatggttccggcgattcgtcgtctgtacccggagaacaacgatgcgcgtaagcaggcgattaagcgtcaccttgagtttttcaacacccacccttacgttgccgctccggtactgggcgtaacgctggcgatggaagagcagcgcgccaatggcgcagagattgacgatggcgctatcaacggcatcaaagtcggtctgatgggaccgctggccggcgttggcgacccgatcttctggggtaccgtgcgtccggtgtttgcagccttaggcgccgggatcgcgatgagcggtagcctgctcggtcctctgctgttctttatcctgttcaacgcggtgcgtctgctgacccgttactacggtgtcgcctatggttatcgcaaaggcgtggatatcgttaaagatatgggcggcggcttcctgcagaaactgactgagggggcgtcaatcctcggcctgtttgtcatgggggcgctggttaacaagtggacgcatgtgaacattccgatggtggtgtcaaaaatcaccggctctgacggacaggttcacgtcaccacggtgcagactatccttgatcagctgatgccgggtctggtgccgctgctgttgaccttcgcctgtatgtggctgctgcgtaagaaagttaacccgctgtggatcatcgttggcttcttcgtcatcggtatcgccggctacgcggtcggcctgctgggtctgtaatttccaggctgtacgccgggggcttgcccccggcttttttttatcaggagaaacgcaaagcaatgaccttcacggacctggtgatcatcctgtttatccttgcgctactggcctacgcgatatatgaccagtttattatgccgaggcgaaacggcccggtactgctggccatccccctgcttcgccgcagtcgcgttgacggcatgatctttgtcggcctcaccgccattctgatctataacaacatcacccagcacggcacggcgatcaccacctggctattatctgctctggcgctgatggggctctatttattctggatccgtacgccgaaaatcatttttaaaccgcgcggctttttcttcgccaacgtgtggatagaatatcagcggattaaagagatgaatttatccgaggacggtgtgctggtgatgcaattagagcaacggcggctgctgatacgcgtacgaaatatcgacgatctggagaagatatacaaacttctcattacaactcaatgacttaaaaatatagccggcgctatattattcccgttagcagcggagaaatattatagccacggctatatttaccgcctaaccttatcttttttattaactattttttcacttataaatttaaatgaaaatcgttatcatttggttattaaaatagccctcttctgttattgttttatattctaaaaatatgttaaggttgcgcccgtcgttggggagtagccgatttcctgcccgccaggaaatgtacgtgtcaacatactcgttgcaaaacgtggcacgtacgggttgaagagattcaatcaggcgagaccatagatacatcactgctgtacgtattgctcagccattgagcggctccgcgtatgtttactgggggcagcgatgtgtcatatggattatccccggtcaggacacgcacatgaatttatccgctaccattcttctcgctttcggcatgtccatggacgccttcgcagcctccatcggcaaaggcgccaccctgcataaacccaaattttcagaggcagtacgcaccgggctgatttttggcgccattgaaaccctgacaccgctggtcggctgggggcttggcatgctggccagccagtttatcctcgagtggaatcactggattgcctttattttactggtgtttctcggcgggcgaatgatcgtcgaaggttttcgcggcgacagcgacgaggcgtgcgaggcgcctcaccgacatggtttctggcttctggtcaccaccgccttcgccaccagccttgacgcgatggccgtcggcgtcggtctggccttcctgcaggtcagcattgtgaccaccgcgctggcgatcggctgcgccacctttatcatgtcgacgctggggatgatggtcggtcgctttatcggcccgctgcttggcaaacgagccgaaattctcggcggtatcgtgctgattggcatcggcagcgaaatcctctggagccatttcgccggttaagctttacgcttcgcgctgccagcagtggatcataaaatcggtctggcaaccaaaggtcggctgctgacgcagcgcggcgtgcacttcggctttagcccgccatgcgaacggcgtcatctgcagcagggcctgcgcttcacttcccgtcaggatcatcggataagccagctgctgctgagcctccaggcggaaccccggcatcgcttccgtcttcagctcatgcaggcgaacttcatcgtaaataagccctttcagctccagtaagtgacggggacccggcgtggcggtgatcacccaaccaccgggacgcaccacccgcgccagctcttcggcgttgcagggcgcgtaaatgcgcaccaccgcgtcgaagctagcgtcggaaaatggcaggcgctggctggaggccacgcaaaaattcacctgcgggtagcgttttgccgccgcgcggatcgccggcttcgacacgtccagcccccagctgcggctggcgatggcggcaaacgcgtgggtgtaatacccctcgccacagccgatatccagtaaatccgtaggggcgtaatgtcgcagccgctcagcgatagcatcccgtagcggctgataatgtccggcgtcgaggaacgcccgccgggcctgcatcatttcggcgctatcgccgggatcgcgcgaccgcttgaactgcaccggtagcagattgacgtacccctctttcgccagatcgaactggtgccgctgcgggcaggaatagtggttgtcgctacggctgagcggcgcgtgacaaagggggcaactgtatgacatgacggctccggtgttgctgaaagggcgaaagtgtagcgctattcgcccctgcagaccactgttacagcgccggcccctgtgggtggctatcgtgcattacgatcagattctccgccccttgcggcatgccgtccggcatgacgttctccagccgcaggacatcgcccatgatctggctgaagaccggcgcggacacagcgccgccgtaataggaaccattgctcggatcgttcatcaccaccaccagcgcgaactgtggtcgactggcgggcgccacgccggcggtataggccacatacttatcgatatatttgccgtccgggccaattttcttcgccgtgccggtttttaccgccacccggtagtcgcgtaccgccgctttggtaccgcccccgcccgggagcgccacgctctccatcatatgttccacgctatgcacaatactctccggcatcacccgcgtgcccatcaccggcggatcgatgcgggtaatcgacagtggtcgcgcaatgccgaagccgccgatggtggcgtagacgtgggcgagctggagcggggtgaccatcaaaccatagccgaaggcgaaggtggcgcgatccagttgcccccagtagcggcgatgcggcatcagcccggcgctttcgccggtcaaccccagccccgtcggttcgccaaagccgaaagctttataggtatcgatcagatgctgcaccggcatggcgagcgagagatgggacacgccggtatcgctggatttctgcaggatcccggtcaggctcagctccggataatagcccacatcgcgaatacgatggccatcgaggacgaacggatgggtatccaccacgctgtctggctggacaatcccctgctgtagcgcagtcatgatcaccagcggtttgaccgtcgacccgggctcgaaggtgtcgctgatggcccggttgcgaaaatcatccagcgtcgcgctatcgcgattgttcggattgaagtccggatagctggccatcgccaggatctcgccggtatcaattttgatcaataccgccgccccggactctgctttgttccagcggacggcgttgtcgagggcgtcttccgtcaccgtctgcaggcgttcatcaatactcagctgcagattatgcgccggtaccggcggcacttcggtaatgttctcaatgacattgccatgtttatctttacgcaccagacgtcgcccgggtttaccggtcaactgggcgttaaagcttttctccaccccttcgatgccctgattatcaacattggtaaagcccagcagattggcagccacgtggcccgccgggtagaaccgtcgcgattcatcgcgcaggtagacgcccggcagatgcagtttatcaatccactctgcctgctcgggattgatctgacgcgccagatagagaaagcgagcgtggggatgattctgtacccgctgggccagctctccgaggttgaggtgcagcgcttcggccatcgcctgccagcgaggcccatagcccacaccgcccttctccatagtggtctgcgggtcgatccagatagcactgaccgggacgctcaccgccagcggccgtccttcccggtcgctgatcatcccccgctcaaccgctacgggttcttcgcgcagggagcgcatatcttcttgttttaccaggttatcgggggagataatttgtagccagcccacgcggaccagcagcagccccagacaaccgagaatggccacacacagtaacccgaagcgaatcggggtgaaactggcggcggacttcgtttttttctttagcaccatagctccggcattgttttgcaaccaactgatttaacagaaaattagcaaaacagactgctacacaatgctaataaagttgagtatttgcaacaagacgcgacgggagggggaaaaatgacatgctttgcaataaaaatgcaaaagccccgcgcaggcgaggcttttatacaagaagagtggtcttgtatcagatagcagttacgttaactgcagccggacctttctggccgtcctgaatttcgaactcaacgttctggccttcagccagagttttgaagccgttaccctggatagcggagaagtgtacgaacacgtctttgctgccatcagccggagtaatgaaaccaaaacctttagactcgttgaaccacttaacttgacctttaatctttgccatttgcaaaattccttagactgttttcttcgcctgctggcgtttacctagataaaactgacacataactgcatgaggcactaatttaaggttcggcagagaagcggtattcaacgacaacgtgtttactcaggacttctttactgaaaatgccacacataaacagaactgtacctcgtttaacccgaaacgtgttatcacacactacgtaaataatggcaagccatttttaaacgtgtctcgatcgttcgcacaaattataaggtaatcatttgatcgcctgcacatttatgcgtctttgccgccactggcaaggcgctacagcatcagccaatatcgcccattcgctgcctcattactgcaacttttttaccatagctcaacaacttcgcttcgtccaggtatgtccgtacacgaactgctgtgatgtaagcgtctggtgggcaacggtgaatattgatgcgcataattcgttataactccagactaaaaatcgctaagccgtgccagtgtagtgataataaaacctgttagtcgtcacgctaaaaatagtgctaattctgcaccttaataatgaaaaaaagatgacagtgtcacgttacccaacaataaacgcggcgagaatgactttatttacagcgtgtaataaagaggatattgcactaagaaaggaataatggaataagaataagatattaccgcccgctatcatgcaggtgcgcatcttatgatgcacacctgtcgggcgccttaacgttcagctaccaggcggataaactcatcctcccctttcgccttgccggcgacggtcggctcagccacatcctctttctctggcgcattagcttcgcacaggcgacgtaacagcgcattctgccgcttttgctgatccagcagcgcttgcagcagctctatctgctcattcgcccgcgaactggcgcggttgacgaagaaccataacaacagaccgacaagcagcagcgccacggacactgccagcgatgccagatttaaaatcccaggatttagtaactcactcatttcaccacctcaaagagaaggcgttcattctaccacccgcggcgcagaaggaaatcagtcggcagaaaaatgtcttaccacggaataaatttattaatagtgcaaatgccgctgaaaaactgaacatcctggtcgcacattacgttaagcatctgagtccacagcaacaggcagcctgctatgatgactatcagtaaaacccaccgtaattttttcactccactctccgcatcagtacgcaatgtcgccaggatagcacggccttcttaaaccgcggctaactgtattacgaaaggtaagtttaggaatcatcgacttgtttcaaaacgtgttcgtgtcaaaatcacgccagggatcatacaaataatgaggcatcaatgcgattaatcattcgtactattatcttggtggctatcttatggattggcgtattattgagcggttatggggtgttattccacagtgaggaaaacgtcggcggtctgggtcttaagtgccaatacctcaccgcccgcggagtcagcaccgcactttatgttcattccgacagcggagtgatcggcgtcagcagttgccctctgctgcgtaaaagcacaaccgtggttgataacggctaacatcgaaccggcgatcgcgacgtagcgccgcggtcgccaacccggtatccgccgcctcagaacggatagtcgttgtatcccatttgttcagaaatcttacgcgccgcctgatggagcatcgccacgtattcatgcaagcgttcttcagagaaacgtagcgttgggaaagagatgctcagcccggcgatgaccacgccgaaacggtcaaacaccggcacgccaatgcagcgcagcccctcttcctgttcctcattatcctcgccatagccctgctcgcgaacgccatccagcacttttagcaactcctcggtgctggtaatggtccgctcggtgctgcgcttatactccacgccgtcgaggatctgctccacttcgctgcgatcgcgccatgccagcagcaccttgccaatcgcggtactgtacagcgggttgcggcggccaatacgcgagtacatccgcaggttatacatcgagtcaattttatggatgtagacgatactgtcttcatccagcgccccaagatggatggtctctttcgtcagtcgcgaaagttcgcgcatctgaatatcggcgctgcgcaccaggtcgacgttctgcagcgcgcgcgcgcccagttcgaacagcttgagggtgagagagtatttctcagactctccttcctgtgccacatagcccagtgatttcatggtctgtaaaaagcgataaacggtgcttttcgacatcatgacgcgctgggacagttcggtaatgccaatttcacgctcttcacccagcgcctgtaggatgccgaaaaccttcaataccgaagagacagaatctggctgtttatccaaatctgcacctgccatttatcacctcgtcgtaactgttttataaaaattagaaccggtttttattataaattcgccgcctctgagccgcaatcattcttctgccacttcgttacaaatctgcgacatactgcgaattaatcaatgctaaactcatcattcaaaaaaccgtttcatttaagactcatattcaccatggataaaaattcttctgatggcgtgccgttgccgcaacgctatggcgccattctgaccatcgtgcttgggctgaccatggccgtgctcgacggggctatcgccaacgtcgcgctgccgactatcgccagcgatctcaacgcctcaccggcggcttcaatctggatcgttaacgcctaccaaatcgccattgtcatcgccctgctgccgctctccttcctcggcgacatggtcggctatcggcgtatctataagataggcctggtggtgtttatctttacctcgctggcctgcgcgctgtcgcgtagcctcgaaatgctaaccttcgctcgcgtcgcgcagggattgggcggcgccgcgctgatgagcgtcaacaccgcgctgatccgtctgatttatccgcagcgctttcttggtcgcggcatgggcattaactcctttgtcgttgccgtctcttcggcggccggcccgactatcgccgcagcgatcctctccctcgcctcatggcaatggctgtttttaattaacgtgcctctcggcatcgtcgcctttgttctggccatgcgctttctgccgcccaacagcgcgcgcagcaaaatcatccgcttcgatctgccgagcgccattatgaacgcccttaccttcgggctgctgatcaccgccctgagcggtttcgcccaggggcagtccactcagctggtgctggcggaggtcgccgctatgctggtggtggggttcttcttcgttcgccgccagctcacgatgcccgtccccctgctgccggtcgacctgctgcgtatcccactcttctctctctctatctgcacttccatctgctccttctgcgcgcagatgctggcgatggtctccctgcccttttttctgcagtcgatgatggggcgcagcgaagtggagaccggtctgctgctaacgccgtggccgttagcgaccatggtgatggcgccgctggccggctatttgatcgagaaatgtcatgccgggctgctgggggctatcggcctgctgattatggcctgcggcctgttcggcctggcgctgctgccctcgtcgccctccgatctggatatcatctggcgcatggcgctgtgcggcgccggcttcgggctgtttcagtcgccgaacaaccataccatcgtcgcctcggctccgagccatcgtagcggcggcgccagcggcatgctgggcaccgctcgcctgctcggacagagcaccggcgcggcgctggtggcgctgctattcaatttgctcggtaacaacggcacccacaccgccctgctgctggccggcaccctggctatcgtcgccgcgctaattagcggtctgcgggtcactcagccgcgcgcagcctgacggacggtaaaaaaaatccgcagcttgcgggctgcggattttcgttttcagcgtcagaagatagattatttcagatattcaccgctacgcagggcttcaatacgcttatccagcggcgggtgagtcataaacagttcgctcatggatttcgctttaccgttaatgcagaacgccatcatgctgctggcttcctgcggctcatagctggttttcagacgctgcagggctgcaatcatcttctcgcggcctaccagacgcgccgagccggcgtcagcatggaactcacggtaacgcgagaaccacatggtgattatgctggccagaataccgaacaccagctcaagcaccgtggcgaccgcgaagtagatcagcgggttgccattgctgctctccccttcatcttcccggttgccgccgaggaaaccggccgcaatctgcgcgataacgcgggagataaagataacgaaggtgttcaccaccccctggatcagggtcatggtaaccatatcgccattggcgatgtggctgatttcatgggcaatgaccgcttccgcttcatcacggctcatgttttgcaacagcccggtgctgacggcgaccagcgaggcgtcacgacgcgcgccggtggcgaaggcgttaatgtcaggcgcgtgatagatagctacctgcggcatggcaatacctacctgctgcgcctgctgcgcaacggtattcatcagccagcgttccgtttcgttgcgcggctgctcgatcacttccccacccactgacttcagcgccatccacttcgacatcatcagcgaaacgatagaaccaccgaagccgaacagcagggccataatcagaagaccggtcatgctgctggattggatccccgtgaggcttaacaccagcccgaacacgaccatcactgccaggttcgtcagcaggaaaagcgcgattcgcatcataattttctttttacctcaatttaacaaaacgcactatgcgattacccacatcgtatgggtcaggctgcaattttcaaccatcagcccccgctaagtcacgataaaaacacaactttacattttgtagcatcttgctgacagcggcagcgcaggttgacattttgttagatgagctgaatggcgatgacaacgcgcacaaaaaaaacgggcacctctcagggtgcccgttagcaacttatttgctggccggcggttccaccgccgggcgcgctttttccagatgcgccaggtctaccgcgatatggaccgtttcatcaagatacggatccggctcctggtaatccttcggcagatcgtccagttttttcaacggcggcttgccttcgcgtttcaggcgatcgttaatccgcgccagacgaatcgcatcatcttcttcgttctctttctcacgctgggcgtagttcagagagacgatgttacgtttgtccttcatcgcgttataacgggcaatatccttcatgatgtactggaattcaggatcctgcgcaatacgctcgtcgtggcgcttgagcagctccggtccaaacggggtcagatccccggacttcacataggtggccgcgttgatgctatcccacggcagcgcgttgtcttcatactgctcgccggtttcgcgatcttcattgccggttggcatcatgatatccggcgtcacgcctttgcgctgcgtactgccgccgttaatacgatagaacttctggatggtgtactggacggaacccaacgccggccactccggacgcagcatttgatcgtaaatacgattcaacgagcgatactgctgtaccgtccctttaccgaaggtcggttcgccaacgatcagcgcgcggccatagtcctgcatcgctgcggcgaagatctcagacgccgaggcgctaaagcggtcaaccagcaccaccagcggccctttgtaataaaccacgccatcgttgtcgctgtcttcgcgcactttgccattattatcccgcacctgcaccaccggaccggacggaataaacagacccgagagcgataccgcctctgtcagcgctccgccgccgttgctgcgcaggtcaatgatgatgctgctgacgttctgtttttccagcttctgcagctgcactttcacgtcatcggtcaggccaacgtaaaagcctggaatatccagcacgccgactttttctttcccgacggttttcaccgacatcttcaccgcacggtcttccagacgaatgcgctcgcgggtcagcgttacaatacgcgtcttggctcctttaccggccggcaggatttcaagacgaaccttgctgcccttcggccctttaatcagcgccacgacgtcatccagacgccagccgatgacatcaaccatcgacttcccggtctggccaacgccaacgatgcgatcgccgacgctgatcgctttgcttttcgcggctggaccgcccgccaccagcgaattaatgacggtatagtcatcatccatctgcagcacggcgccgatcccctcgagtgagaggctcatttcggtgttgaactgctcggtattacgcggcgacagataatttgtgtgcggatcgatttcgcgagcgaaggcggtcatcgccagcgagaagacatcttcgctgttggtttgcgccaggcgacggatagcaaacttatagcgacgggttaaggtgtcgcggatctctttatcgtctttacccgccagcttcaggcttaactggtcaaacttaaccttagcgtcccacagcttgttcagctcggcctcgtcttttggccacggcgctttggagcggtcaaggttgaaattatcattgccggtaaagtccatcggacgttcaagcaccttcagcgcatactgatagcgctcgaagcggcgctgctgccccaggttgtagaggtcgtaaaagacgtccagtttcccgctgcgcagctcatcgccaatttggtcttttttagccgcaaacttcgccacatcgctggccagcagcacattgtggctgtagtccagcaggttcaggtaacggtcaaaaatctttgccgagaaggcgttgtcgagatcaaactgacggtaatgagagcgggtaaagcgcgacgtcacgcgctcgcttaccgtcgcgtgctgcggctcttctttcagcacggggatttgatctgcgcgggttatgtcatcaacagcgaatgcatggcctgctattgccagcaggcccgcaagcgcggtgattttaaaaaatgtgttcatgcctggcccggcctccgtttcagaacaccaggtgttctgcgcgtacaatcattgacataccagaagtcagctgtacacgaacgccatctttggtgatttccagaacggtggcgtccatggcgttattgcctgcttttaccttcagcgcctggccgacggtcagaacggaaacatccgataccggagtaagacgctcttcacgcggggctttggccgcaacaggacgcggtttacgctgttcagcgccttctttacgacgcggctgctgaggacgcggtttacgctcgcggcgaacgccttcatcctgctggcctgcggccgcagcggcttcgcgttttttcgcctgctgggctgcgcgctgcgcctgaacgcgagctttcgcttcttccagctgctgacgcgcatgggcaatgtgctgctcttccagttcgccgcacggattgccatccaggtcaacgcgaatagcgccggcttttacgccgtacagataacgccagctggacgtgtagagacgtaatgcagcgcgaagctgggtcttgctgagattcatctcaccacccactcgctcaacgagatcctgaaaaattccgattttcagggggcgcgcttcaccttcagcgctaaagcactgcgggaaacgttcggccagaaaggcgataacttctttactgctattcaacttaggttgattttccatgaaatttcctgattacaacggacgtagccaacaagccgcaggcatgaacaggcgacattataatgacgtcctcgctaaatgctacgttatccgttgattatcccacgacacgggtaaagattttttgataatccgtggccgcaatgagtttttccagatgctcgaccagcgtgcgcaacccctgctcatcttcagcggtgaagcgcccgtaagccggactatcgatatccagcacgccgataatctggccattcacgcgcagagggaagacaatttccgaattactggcggcatcacaggcaatgtggccgtcaaaggcgtggacgtcctcgacacgctggacctgagcctgcgccaccgccgcgccgcatacgcctcgcccgaccgggatccgcacgcaggccagtttgccctggaacggtcccaacaccagggtatcgccttccagaaggtagaaaccggcccagttgacctcgctcagccgctcgaacagcagcgcgctggtattggcgatcatcgccagaaaactggtttcacctgccattaatgcctggaaatcgcggttcagatccgcgtaaaattctgttttgctcattatatcttcactttgttgtcttactgcctgatacgtacagcctactaaaataagcattaaatgcgcttgggctcaagatgaattcattcataggttaagatagtgagatacattcattcctgtacgtaataaatgccgataaaaacacccaccctcaaacctgcgaaaaagatggtcgtgcataccgtcagcacgccgcttccctatgcgcattatcagcgctgtacgcagtgtgacatgctcttccgcttaccggtgctcaaacgcaaccaaagcgcctggtgtccgcgctgtaacgcgaaggtgcgcgatggtcgcgactggtcgctgacccgcctgggcagcatggccctcgcgatgctattgctcatgcctttcgcctggtctgagcctttgctgcgcctgcatctgttgggcgtacgcatcgacgccaacgtcctgcaggggatctggcagatgaccgcgcagggcgatccgattaccgccgccatggtgctgttttgcgcggtagtcgccccggtgctgctggtggtctccatcagctatctctggctgggcaatgtgctggggatgaacctgcggccggtgctgctgatgctcggcaagcttaaagagtgggtgatgctggatatctatctggtgggcatcggcgtcgcctccatcaaggtgcaggattacgccttcctgcagccgggcatcggtctggtggcgtttatctccctgacgttgttgagcatcctgacgcttattcatatgaacgtcgaagagctatgggagcgtttctatcccgagcgtccggcgacccgcgccgataataatctgcaggtgtgcaccggctgccattacaccggctatcgcgacgcgcgcggccgctgccgacgctgccacacgccgctgcatcatcgccgaccgcagagcctgcagcgcagctgggcggcgctgattgcctcgctggttttcctctttccggccaacctgttgccaatctccatcatctacgtcaacggcgcgcgccaggacgacacgatcctctcggggatcatctccctggccagcagcaatatcgccattgccggggtcgtgtttatcgccagtattttggtgccattcaccaaagttatagtgttatttaccctgctgctcagcatacaattcaagtgcgagcagggattgcgcacccgcatcctgctgctgcggctaatcacctggattggccgttggtcgatgctggatctgtttgttatctcactcaccatgtcgctaataaatcgcgatcagctcctcgccttcaccatggggccggctgcggtttactttggcggcgcggtaattttaactattcttgcagttgaatggctggacagccgcttactttgggacgcacatgagtcaggaaacgcccgcttcgcagactgaagccagaataaaaaccaaacgccgtatttcgccattctggctgctgccggtcatcgcgttgctgattgccgcctggctaatctggaccagctttgacgatcgcggatcgacgattacgattgatttccagtccgcgaacggcatcgtgccgggacggacgccgatccgctatcagggggttgaagtcggcaccgtccaggatattagcctcagtaaagatctgagtaagattgaggtttcggccagcatcaaacgcgatatgaaagatgcgctgcgcaaagagacccagttctggctggtcacgccgaaagcctctctggccggcgtatcgggcctcgatgcgctggtgggcgggaactacatcggcatgatgccgggcaagggtgaacccgaagatcactttgtcgccctcgacacccaacctaaataccgcatcaacaacggcgagctaatgatccacctgcaggcgccggatcttggctctctgaacagcggctcgctggtctacttccgaaaaatcccggtcgggcgggtgtatgactattccctgaatgccaataatcagggggtgaccatcgatgtgctaatcgagcgccggtttaccaatctggtgaaaaaaggcagccgcttctggaacgtctcaggcgtcaaggccgacgtcggcctgagcggggccaaagtgcaactggagaacctgtccgcgctggtgaacggcgccatcgcctttgactcccccgccgattcgcatgtcgcctcgcaaaacgatgaatatcacctgtatgaagatctggcgcatagccagcgcggcgtggtagtgaccctcgatctgcctgatggcgatggactgaaagcgggctcgacgccgctcatgtatcaggggctggaggtgggccagttaagcaaactgaatctaaaccccggcggcaaagttactggcgagatgaccgtcgacccgagcgtggtgacgctgctgcgggagaaaacgctgattcagatgaagaagccgaagctctccctcgataaccccagcattagcaccctgctcaccggcaatacctttgagctggtgcccggcgaaggcgagccacgcaatcacttctcggtaatgccggcggataaagcgttgctggatgagcccaacgtcgccaccgttactctctcggcgccggagagctacggcatcgacggcggtcagccgctggtgctgcacggagtaaaagtcggccaggtgctggagcgtaaactgacggccaaaggggtaacctttcaggttgccattgaccctgaataccgcgatctaattcacggcgacagcaaatttgtggttaacagtcgtctggacgtcaaagtggggctcgacggcgtgcaggtgctgggcgccagcgccagcgaatgggtgaacggcgggatcagggtgatccccggcgaaaaaggcaaaatgcaaagcagctatccgctgtacgctaaccttgaaaaggcgcaggaaaatagcctgagcgaagtgccgactactaccctgagcctgtctgctgagacgctgcctgacgttcaggccggctcggtggtgctgtatcgtaaattcgccgtcggcgagatcatcgccgtcaaaccgcgcaaggatgcattcgatatcgatctgcatatcaagccggagtaccgctacctgctgaccaacaacagcgtcttctgggcggaaggcggtgcgaaggtcaagcttgacggtaacggactcaccgtgcaggcctcgccgctggcgcgcgcgatcaaaggggcgatcagtttcgataacctcaatggcagcagcgccggagcacggctgaataacaaacgtatcctttatgcatctgaaacggcggcgcgcgccgtgggcggccaaatcaccctgcacgcgtacgacgccgggaagatggcggccggaatgccgattcgttatctcggcatcgacatcggtcaaatccagtcgctggagctaatcaccgccaaaaacgaagtgcaggcgaaagcggtgctctatccggaatacgtcggcaccttcgcccgcgccgggacccgcttctcggtgatcactccgcaaatctccgccgcgggcgtggaacatctcgacaccctgttccaggcctacatcaacgttgagcccggccgcggcccggcacgacgcgattttgagatccaggatacgacgatcagcgattcgcgttatatcgacggccttaacatcgtggtggaagcgccggaggcggggtcgcttggcatcggtacgccggtcctgttccgcggactggaagtcgggacggttaccggactgtcgctggggtcgatgtctgaccgggtgatggttaagctgcgcatcagtaagcgctaccagtacctggtacgtaataactcggtgttctggctggcctcgggttacagcctcgacttcggcctgattggcggggtggtgaaaaccggtaccttcaatcagtttatccgcggcgggatcgcctttgccacgccgccgggcacgccgctggcgccgaaggcccaggatggcaagcacttcctgctgcaggagagcgagccgaaagagtggcgggagtggggcaccgctctgccgcagtaatgcccccttctcccgccccgggcaacgccgggcgcggggagagggtaaaccgcacgccccggtgtcacgcgccggggcgtttgtgctaaactgcgcacccttttttttctgtggtgcgctgcccgtggctgaaaatactgtctatttccctgaagcgtttctcgctcaaatgcgcgcggcgatgccagcgcatctctctttcgacgactttatcgccgcctgtcagcgcccgctacgccgcagtattcgcgtcaatacgctgaagattagcgtcgatgatttcctctctctggttgccccctacggctggcagctcgcgccggtgccctggtgcgcagagggattctggatcgagcgagaggatgacgacgcgctgccgctgggcagtaccgccgaacatctcagcgggctgttctatattcaggaagccagttcgatgctgccggtcgccgccctgttcgccgataaccggcagcccgaacgggtgatggacgttgccgccgccccgggatcgaaaaccacccaaattgcagcccgaatgggcaacgcgggcggcattctcgccaatgaattctccgccagccgggtgaaggtgctgcatgctaacatcagccgctgcggcatcagcaacgtcgctctgacccacttcgacggccgggtttttggcgcggccttgcccgaaaccttcgatgccatcctgcttgacgccccctgctccggcgaaggggttgtacgtaaagacgccgacgcgctgaaaaactggtcgccggagagcaacctcgacatcgccgccactcagcgcgagcttatcgacagcgccttccatgctctgcgccctggcgggacgctggtgtattccacctgcaccctgaatcgtgaagaaaatcaatcggtcattgagtggctgctgtcccgctatccgcaggcggtggagatcctgccgctgggagagttgtttcccggcgcagccgacgccctaaccgcggaaggttttctgcacgtttttccgcaaatttacgattgcgaaggcttctttgtcgcgaggttgcgcaaaactgcggcgatcgatccgctcccggcgccaggctataaggtcggtaaattcccgtttacgccgctgaaggaccgggaggccgccgcggtaactgccgccgccagggctgttggcctggagtgggacgcaggccatacgctgtggcagcgggataaagagctgtggctgtttccgctggctttggagcccctgttcggcaaggtgcgcttttctcgcatcggcgtgcgcctggcggagctgcacaataaggggtaccgctggcagcatgaggcggttatcgcctttgccgcgccgcagcgcgccttcgagctgtcgcaggaggaagcggaagaatggtatcgcgggcgcgacgtctatccgcaaaccgcgcctgggcaggatgaaaccattgtgaccttccagggcgtcccgctgggcctggcgaagcgcgtcggctcccgactgaagaacagctatccgcgcgaactggtgcgcgatggaaaactttttgccggcaaggtgtgaggccgcgcaaaaaatgcgcactttttgactggcgcttttcgccccattgactacgctgaaaaataacggccataactggtcgtaccacaactcagctgaaaaatggggtgaagcgatgagtaaaaccaatgtccgcatcggcgcgttcgaaatagacgatgccgaactgcacggtgagcatcagggtgagcgaacgttaagcataccctgcaaatccgatccagacttatgtatgcagcttgacgcctgggatgccgacaccagcgtgcccgcgattctcaatggcgaacattctgttctctaccgtaaacattacgaccgccagtccgatgcctgggtcatgcgccttgcctgacaccaatgaacccgtcgcctgagacgggttatttatttccccgtcccgccgtcatcccctacactaaatagtatgtgaacccgagcatgaggccaggatgtttgccttagtgttgtttatttgctatctggatggcggctgcgaggacattgtggttgacgtctaccgcgaggaaacgcagtgcttagtggcgatggaggatcagcggatccgccacggtggctgctacccgatagaagattttattgatggcttctggcaacccgccagcgaatacagcgacttttagcctgccgactgcagcgccaccagcgtcagcgtcccaccaaacacagcgcccgtatcaatatagtgttgattatcgtggtcataacgcgcctgaagcggcgtatggccaaaccagaaatggtctgcgccgccaatagcgccatggcgccccgccaggtgttcactcagacgatggcggctccatagtacccgttggggatccaccggctgctgccagcgatagaccggcgccgggtaatcggcgtgggcgatcacatgccgcgctttctcgcattgcacttcaataatcaacggtagccgccgacagtgcgccagcagccgatcgacgtcggcccgctgccgcgcatcgcccttgacgtaccagtcgccaccgttcatctgccagagccgcatatctccgctctccagcgcctccagcgccatctgctcatgattcccccgaacggccctgaaccagcgacagcgcaacaggccaagacaatcggcgctctgcggcccgcgatcgatcagatcgcccaccgagatcagcagatcggcccagggatcaaaacgcagctgacgcaggcgattcatcagcagcgcaaagcagccatgcagatcgcccatcagccagatattacgccagtcgctgccgttaatacgttgatacatataattacctctcagcggtaattataggtaattccagcaaaggtccacggaatttaatttacacctcaatcaattttaaacagacggcaaatatagtccgccagaggattaagcttgtcagtggctcgctttaaaatagggggaaatcacaacgaggtgtttatcgtgacagacaatagcctgcattcatccggcgtgctagcgccgcgctcgcatcttattgccgatctggtgatgggcagattgacacctgcccccatctggcggcaaaaaaattaccgctttaagtttttgctgcgcacggccctattttataacgccaccagagcgatgctggaagcgctcagcgctcgggatgattttaatcagctgctggccgcgcaggctacgctgccgggcaaagtacaccgtcaatatctgacccgcgatctcaacgcctggcagcgggcggtggcggtaatcaaccattatcgctatatcgacaccctacgcggatcgcggctggcgcacgctatgaccgcggtgtctgaggtcccgctgctgacgttaaacggaaaagaggaccgccggtttactctttatgcctcctcggcaggcaaagccgaacgtgagggtgaaaccactctgtggctgcgcgacagcgaccacaccctgctggccagcgccaccttcagcgtaacccgtgatcacgatgcctggcagctggttatcggcggtctgcaggggccgcgacgtcacgtttctcatgaggtgattaagcaggcgactcgcgcctgctacggcctgtttccgaagcgcctgctgctggagtttatctggcagctggccgcgcgcagccaaatcgcggctatttacggcgtcagcgataatggtcacgtgttccgcgccctgcgctatcgcctgagcaaaggccgccatttccacgccagctacgacgagttctggcagtctatcgacggccagccggaaagcccctggcgctggcggctaccgctatgtctggaaagaaaatcgctggagagtatcgccagtaaaaaacgggctgaatatcggcggcgattccagctgctggatcagctgacggagcaggtggcaatattgacgcagcggcatgccggtgactaaattgcgctgtcggtgaagccgaattacaacatggcgtttgcttattatgtcaatatttcgctactatcagggtccccgaaggccaccggatagtcgcttgcataatgagtaaaaccgaaatttttctgctgattattctggcggtcattctgctcgggagcatatggtttattttcagcgatgaaatttggctattgctctgctatctggaaagccagatataccctacattcagcgttccgcaataatattttccgcccgcaaaagtgctcgtgcttattatttatgccacctcgtcagccggcgaggtgtaatcgcatgaattgccaaatcgtttagattttgcttattttatttatcatacaaatatgtatactagcaggcttccgatgttggcccgccagttaacctgcacgccgggcctgtttaggtgcaggttttttctttactccgccctcgtttacggttccaccgttgccacctccccttctacaggatgcgatttatgtgtaaatgaattgtgtatgctaaaaacggtgtgctataacgggacatccagaggccagcgggtgtttgactgacaggatgtcgctggctcttgggaaagaagacagataaagataaaaagagaccgaatacgattcctgtattcggtccagggaaatggctcttgggagagagccgtgcgctaaaagttggcattaatgcaggctaagtcgccttgcactataagaatagtttaacgcgtcagcttttccagtccgcggccaaagtggctgcataattcctggaaagggggcctctgccagcgaaaaaaccgccactgccgttgtccggcaagggcggtttttttgatgttattacagcaggatagcgagaaagtttagcagagcttctgcgctcgctcgataaagggcgcgaggctcattttttgtcccggatgctgcggatcgtcgatctggatcactgagatcggctgcgcggtggttttgccggctttgacctgctgctcagccacctcattgagcggatactgaaccagcgtgctcgggttgatggcgtaaagcgcgttacccggtcgacaggtcaacataacctcttcccggttgaacgcccagctctccttccccacctcaaaacggctcacggtgataatttgtggcgctgccagagcagccccggagcttgccagtaacaacatggtcagaacaatttttttcatgattttgccagttaattcaataaggttcccaggtggcaaacagactgacggccagcagcgccagcgcgcccagccctatttcagcctgcgtggttcgcaggatcaggctttccgcctgcgaaccgcttgccgacatgcgcggtaccagaacatacctgttcactaacgcaattaccaccatcccggcgaccagcgcacatttgatcaacaacatgcgtccccacggcgatgcgccaatcaatcctccctggatcaacagcgcattgagcgctccgctggcaatcgtgccggcgacggccagatgcccgtaacgtgaaaagcgcgccatggtatagaccgcggccggccgccagcgcccctgcgccaggcgcaggcaatagataaagggcaacagaccgccaaaccagctggcgacgcagaagagatgcacagcgtggtttgtccgctgcagcacgccggtgagaccatcgtgcatagcggcgtgccctaccccggcggaaagcagcagctgtgccgccagcagggccaccagctggcgggcgccgtgacggggacggatccacactaccgcaagtgcgatccacgtcagtaggatctgccagatccacactccaccaaagcgggtcccggccaccgcctgccagacggcgggtcgccagacatccgtccagccctcgcccatcattcctccctgcaggagatacagcgccagcgtagagatcgcgccgatcagcagcagcgggcgcagtagtggataaaagcgcagcatcagcacgcgtctcagcggtaccggcgcccaccaggcgccatacagcacgcagccaaaagccagcatcagggagataaagtgcccaaagcgcagggtaatatagagcccggtcagcatcgcttacttcacgctaaaggtatattgccctttggttttatgaccatccaccgagaccacatgccatgccacggtgtactctcccggcggcaaggcttccgccaaaggtaacgtgacctcggccggattatcggcgctgcgggtcagttttccggtagccaccgcatgctgctgcggaccggtgacggtcacgccgctgaatgcgggttcaataccttcggaaaaactgagcgtcagcgtctgtggggaagctgaaagctgcgccccggcggtcgggatctgctgctgcaggtgagcgtgggcgaaggcgcccgccgcggttaacatcccggcaagcgcaacggagaggcgcaacgcgcgtccagcaagaagtcgcatattcgtcattcccttttgttatgtctgtagcacagagaataaccctgtataatgccagagtcgagccaggcatctggccctgaccggatttataagcagagtggagtggatgatggaaagaaatctggccaaaatttcgcaagatgagatggataaagtcaatgtcgatctcgccgccgccggcgttgcttttaaggagcggtacaatatgccggtggtcgctgatttagtcgagcgtgaacagcctgcacatctgcgcgactggttccgtgaacgactgatcgcccatcggttggcctccgtctccctttcgcgactaccgtgggagccgaaacagaaataatgcgtgctcgcctcctccccgtcggttggcaagcccgaccaattccattacgctatttgttttgctctggagcgagccatgctgcgcgtcattgataccgaaacctgcggcctgcaggggggcatcgttgaaatcgcctcggtcgatatagtcgacgggcaaattaccaatcccatgagccatctggtgcgtcccgatcggcccatcagcccgcaggcgatggctatccaccggatcacggaagagatggtcgccgataagccgtggattgaggagattattccgcactatcatggcagcccgtggtacgtcgcgcataacgccagcttcgatcgccgggtgttgccggagatgcacggcgagtggatctgtacgatgaagctggcccgacgcctgtggccgggaatcaaatacagcaatatggggttatataagtcacgtaagctgaacgtgactacgccgccgggactgcatcaccaccgggcgctgtatgactgctatatcaccgccgcgctgctgctggatatcatcaatgtttccggctggacccctgacgaaatggccgatatcaccggtcggccggcgctgctgactacttttaccttcggcaaataccggggtaaggccgtcgccgagattgctgaaaacgatccaggctatctgcgctggttattcaacaatctcgaccgcatgagccccgaactgcgcctgacgctcaggcattacctcggggaatagcgcctacactgccgcttttcccggcagtgtcccctgcgccagggcgatgaaaaaggcgtactccagcgccaccccttcatagcttttaaagcgcccggattttccgccgtgtccagaatccatatcggtgcagagcagcagcaggttatcgtcggtttttagttcccgcagtttcgccacccatttagccggctcccagtattgcacctgggaatcatgcagaccggtagtcaccagcatgtggggatacgcctgcgccctcacgccgtcatagggactgtagcttttcatataatgataataggtttcatcctgcggatttccccactcttcaaattcaccggtggtcagcggaatagtttcatccagcatggtggtcaccacatcgacgaacggcacctgggctatcacgccatggaacagctctggccgttcattcacggccacgcccatcagcattccgccggcgctgccccccatgccgtagcaaagccgcggatcgccgtacccctgggcaagcagcgcgtcacagacgtccagatagtcgttgaaggtatttttcttacacaggaatttaccgtcttcataccattgctgacccagctcgccgccgccgcggacgtgggcgatggcgtagacaaagccgcggttgagcaggctcagccggctggcgctgaaatcggcatcgatactctcgccatatgagccatagccatagaccagcagcgggttgctccctttgcgaaaatgttcgcgatggtagaccagagagaccgggacttcgacgccatcgcgggcagtcacccacaggtgttcgctctggtagcagctcgtatccagcccctttacctcctgctgtttgatcactcttcgttcgccggtatccatatccagttcaaacagcgtatccggcgtagtcatggaggaatagccgtagcgcagtcgcgacgtttcgggctccggattataggcaagccaggtgacataggccggatcgtcaaaagcgatccccaccacctcccgggtcttgcggttaatttgccgcagactggtcaggccacgctggcgctcttccacaaccagccagtcggtaaacagggtaaatccttcgagcatcacgtcgtgacgcggcgggatcagcgtggtccactgttcttcatcacgcagcacggtacggtagaggccgaaattcttcccctcccggttggaacgaagatagaaagcgtgctgatagtgatcaagactgtattcatgatctttacgccgtggcagaaagcagaccggctcggcgtctggcagttcggcgttgagcagcagcacttcgctggtggtggcgctggagagataaattaccacgaactgctgggaggtggttttatgcacgctgacgtagaaggtctcatctttttcctcgtagaccagcgcgtcgctctgcgccggtgtcccgacggtgtggcgccagacctgataagggagcagcgtggtgggatgtttacgcacataccaaacaaagcgtgaatcgttgctccaggcaaagccggaggtgacattttcgaggatttccgggtaccactcgccgttgctgaggtcgcaaaagcgcaggccgtactggcggcgggaaaggtaatcttccgccaccgccattagctggttgttgggcgcaatgcccagtccgcccagggtgtagaactcgctcttcgccgcccgctggttggcatcgagcaggatctcccactcatcccactcttctttcagcaccgactgccgctggtagatagcgtattcgcagcccggctcatacacctgacggtagcgaaagccgtttttactgtagggggcagagacttcccgctgcggaatgcggtcgataatctccttcagcagacgctcctgcaggctgagctgcgaatccatcacttgcttgccgtaagcgttctccgcgtgcagatactccagcacgtcaggtcgcgcgcgctcatcgtcgcgcagccagtaataattatcgatgcgtgtatcgccatgcaaggtcatggcgtgagggatccgtttagctttaggtggcatgttattcttctgctgctttatcgtgacacaagagcattcaggccgcagggtggcgcctgaatgatgacgtgtctataagggtggcaaaagacgcgagcgatgcaagcgaaacgtgatgatttagacgcttagcgcttgtttttgtgactggatatcctgttctatatcggcccggacatctttcggcagcgccagggcgtctcccagcgcattaaggtagctacgctccataaaatggtcgatatcaatcaccgcgcagctgacgtagtagatctccagcgcctcctgcgggtcgatgatgccctcggcgagacgctgcggatccagcggctgggccagcgcctggtcaattagcacccgggcctgaacgtcaatattggccgcccgcagctgagtttcaatattcgcccgctcgtggtcatcaatatgaccgtcgcttttcgcggcaaataccagggccgtgatcagccgcacgctgcgcggatcgacatccgtcggcgccgctgccgtctcaggcgcctgggcggacgtattctgcgcgcgcattttctgctgatacttgttccataacaccgtgcccgccaccgcctcgccgcctgccagcagcgcgctagtgccatatttcgccaacaatttgcgtgacgatttgctggccaccagcaatccggccagcccaccgatggcgccgggcagcaggccgctcccttttgacgactcgccggacggtgacgcaccctgctgcccgagcagcgactgcagttgatgtagccagttagccatggttttcctctcaggtgacaaacactgttatcagcctaaacgacgcgatgtcaggaaatgttagatatggctaaagatgcgcaaaggtacgtgcgacggcagcatcggagccgaccgaccagtgactgaccgccagcgttcaggctgccttggctttgcgcgctttggccgccggcacggcgtcatcacccgccggagaagtctcggcggtagccgacggcgcggaggcgtcctgtgcgggcgtctcttgctccggcagtcggccaactcgcaggatatgctgcagcgcttctttacgctccgccagccacatcgccatggtatcgcgctggacgtcatccatctccagcggcgatgccaccagccagtcattcagcacctctgccagatcgagcattttgtcgtaagcgtcggcctcttttttgctggcaaaagacattttttcctcaccttcgcggatcaccacatatttaatttcaaccgccatactgcagcctctcaacactgtatttttatacagtatagcaaatttccctcccggactcaactcacgcgcgttacgcgcgtaaagacatacgcaaacgttttcgtttataatcgctgccatctttttttactgcggatgagagttatgactgtattaggcaccgcgctgcgcccggcagccaccaaagttatgctgttaggttccggcgagttgggtaaagaagtcgctattgaatgtcagcgtctgggcattgaaaccatcgccgtagaccgctaccccgatgccccggcgatgcaggtcgcccaccgcgcccacgtcatcaatatgctgcacggcgagagcctgcgcgccctgattgaacaggaaaaacctgattatatcgtgccggagatcgaagctatcgctaccgacaccctggtcgaactggaacaggccgggcagaaagtggtccccacggcgcgggcggcaaagctcaccatgaaccgcgaaggcattcgccgcctggcggcggaagagctgcagcttcccacctcccgctatcgttttgccgacagcgaagaaggcttccgcgcggcggttaccgagatcggtttgccatgcatcgttaaaccggtgatgagctcctccggcaaaggccagagctttatccgctcggctgaccagctcagcgaagcctggcgctatgcgcagcagggcggccgcgctggcgccggacgggtgatcgtcgagggggtggtgaacttcgatttcgaaatcaccctgctcaccgtcagcgctgtcgatggcgtgcatttctgcgctccggttggccatcgtcaggaagacggcgattaccacgagtcctggcagccgcagcagatgagcgacctggccctcgagcgtgcccaggccatcgcccgcgaggtggtgctggcgctgggaggttatggtctgtttggcgtggagctgttcgtatgcggcgacgaggtgatcttcagcgaagtctccccgcgaccacacgacaccgggatggtgacgcttatctcccaggatctctcggaattcgccctgcacgttcgcgccttcctcgggctacccgtcggcgctatccgccagtatggtccggccgcctccgcggtgatccttccgcagttgtccagccagaacgtcagctttggccagctgcagtcggccgtcggggctggcctgcagctgcgtctgttcggcaagccggagattgacggtacccgccgcctgggggtaaccctcgccgtcgccgattcggttgaggaggccgtggcgcgggctaaagccgccgccgcggcggtcatcgtcgaagggtaaagacaaaaaaacccggtcgcgttgccgcagaccgggttgttgacctggaggcgtggtttatttcgcgccttccaccgcttctcgcgcgagggtggtgatgcgatcgtagtcgccggcttcgagggcgtcggctggcaccagccaggaaccgccgatgcacagtacgctgttcagcgccaggtagtcacggtagttggccggagagataccgccggtcgggcagaaacgaatgtggccgaacggacccgcaatcgcctgcagggctttcacgccgccgttggcttccgccgggaagaatttaaactctttcaggccatactgcatacccagcatcagctcagataccgtgctgatccccgggatcagcgggatggtgccgtcttcggtcgccgctttcagcagggattcggtaagacccgggctgatagcgaactgcgcgccggcttccgttaccgctttcaactgctcaacgttggtaaccgtgcccgcgccgacaatcgcgtccggaacttctttggcaatcgcgcgaatcgcctccagggcgcactcggtgcgcagggtaacttccagcacgcgaacgccgcccgccaccagcgctttcgccatcggtaccgcgtgttccagctttttcactacgataaccgggacaaccggaccggaggtgaggattgcttctgctgttgttttccagtttttcatcaggattttctctcgccagatctagaaattaaatcgtcttaaaaagtgatgcaggttgcgccctgctccgcgccagagagcttctcacgcagcgccccaaacatctcccgaccggttcccacgcgcgacgcgctgaggtcagggatatgcagctgacgcgccgccagttcggcctcatccaccagcagcgtcagttcccccgtctgtccgttcacgcgaataagatcgccatcgcgcactttcgccagcaagccgccatcatacgcttcaggcgtgacgtgaatggctgacgggactttaccggaggcgccagagagtcggccatcggtcaccagcgctattttgaaacggcggtccaataatacaccaagtggcggcataagtttatgtaattctggcatcccgttcgcttttggcccctgatgacggaccaccaccacgcagtctttgtccagcagccccgcttcaaatgccggcaacacgtcgtgctggctctcaaataccaccgccggcgcttcaatcacctggttctccaccgggaccgccgaagttttcatcaccgcgcgtcccaggttgccgctcagcaccttggtgccgccgtggcgggagaatggtttttcaaaggtcgcgatgacctggtcgtccaatggcgctgtcgccccttcgcgccagtccagctcgccgttattcagccatggctccagggtgtagcgcgacaggccaaagccggccacggtgtgaacatcctcatgcagcaggccgcctttcagcagctcgcgcaccagtaccggaacgccgcctgccgcctggaagtggttgatatccgccgggccgttgggatagaggcgcgccagcagcggcaccacgtctgacaggtcggagaaatcgtcccagttaatgataattcccgccgcgcgggccatcgccaccaggtgcatagtgtggttggtggagccaccggtcgccagcagcgccacgatgccgttgactaccactttttcgtcaaacattttgcccagcggcatccactcattgccgttgccggtcatgcgggtgacctggcgcgcggcggcggcggtcagtgcttcccgcagcggagcatccggatggacaaaggacgagcccggcagctgcatgcccataaattcgaccaccatctggttggtgttcgccgttccgtagaaagtacaggtccccggcgcgtgataagaggcggcttcggactccaggagcgccatacggtcaactttcccttctgcatacagctggcgaatgcgaaccttctctttattcggcaggccgctggccatcggaccggagggaataaagaccgacggcagatggccaaatgagagcgccgccatggtcagaccgggaacaattttatcgcagaccccgagatacagggccccgtcgaacatgttatgcgacaggccgatggcggcggacatagcgatcacctcgcggctcaggagtgaaagctccatcccgtcctgcccctgcgttacgccgtcgcacatcgccggcacgccgccggcgacctggccgaccgcattggcgctgtgcagcgctttgcggatgatctccgggtagtgttcatagggctggtgagcggacaacatgtcgttgtaggaggtgatgatggcaatgttgttgcgcaacatgctcttcagggaggctttgtcgtcagcctggcaggccgcgaatccgtgagccagattgccgcaggccagttgcgcacgatgcacggtgtcggttttggcctggttaatccttgcgaggtaagccgcgcgggtgtcacgcgaccgttcgataatgcgatttgttacccgtaacattgtcgaattcataaaggctcctcaaatttttatctgtccggccgctgcgtgatgacgtgttgacgtggtaaaggccacaaacaccagcgctcaggggcaaaatgtctgcaggcagtgtaataaaaaaagccccgtgggtgaatcctcacggggcttaaaagattaaaaagcgtgcgactttctgcgtcagatcatgttaccggtaaaataaccctgacggattagcctccagccttactcgaactcgttccatgaacgaccgtcgcgagtgatcatggccaccgacgcaaccggtccccaggtcccggcctgatacggtttcggcgcatcgcggtcggctgcccaggcttcggtaatggagtcaacccatttccacgcctcttctacttcgtcgcggcgaacgaacagcgcctggatgccacgcatggtctccagcagcagacgttcataggcatcggccaggtgcgtctggttgaaggtttcggagtagctcagatccagtttagtgatctgcaggttatgtttatgatcgaggcccggcactttgttcagtacctggatatctaccccttcgtccggctgcaggcgaatggtcagcttgttctgcggcagctcctgccaggtctctttaaacagattcagttccggggttttgaagtaaaccactacctctgagcatttggtcggcagacgtttgccggtgcgcagatagaacggtacgccagcccagcgccagttatcgatatcgacgcggatcgccacgaaggtttcggtgttgctggtcttgttggccccctcctcttcgagatagccaggcacttttttgccctgggcaaagccggcggtatactggccgcgaacggttttctcgcgcacgttggagcggtcaatacggcgcagggatttcagcaccttgaccttttcatcacggatgctgtcggcgctgagatcggacggcggcgacatggcaatcatgcacaggatctgcagcaggtggttctggatcatgtcgcgcatctgcccggcctggtcgaagtaaccccagcgcccttcaatacccacctcttccgcgacggtgatttcgacgtgatcgatggtgcggcagtcccagttattgacaaacagggagttggcgaagcgcagcgccagcaggttgaggaccgtctctttaccgagatagtggtcgatacggtagacctgacactcttcaaaaaactcgccgacctggtcgttgatttcacgggaggtttccagcgaggtgccgagcggtttttccatgaccacgcgcgcaggcttggcattaagcttcgcttcgcccagccctttacagatcgcgccaaaggtgctcggcggcatggcgaaatagttgatggtgacacggttcttttgatccagcatctcacccaggcgggtgaagccgctggtgtcattgacgtcaagattacagaactccaggcgtccgctcagggtatcccacaaaccttcatcaattttttccttcatgaaggtttccagcgcttcgcgcacgactttggtataagccgctttatcccagtcggcacggccgacgccaatgattctggtgtcagcgtggatctggcccgccttttcaagctgatacagggaaggcaacaatttacgccgcgccaggtcgcccttcgcgccgaaaatgaccaggtcgcatgcctgggccgtttgcgttaccgccatgtcattctcctcagttgatagtctggtgcttttgccaggctatatttgtaattttcttacactgcactgtactgtgtttacgtatttcccgaaagccttccccttcgtttgcggcggtaaaaccgcacagggtgaaaacattcggcgatgatttgggcattcggccgttattgttcgttgtttgtacctggttcaggtcagtaaaatacgaccctgatcatgtaatgaaaaaaaacaacatcatttcacgtcattcctcaccgcttgcgcttgcggaggggtatattcttgctaaaacgcccaatgatttcacccattaatgaaatcgtttccattgatgagcgccctgttactaatgaacatgctggaaaaaatccagtcccgactggaacaccttagcaaatctgaacgcaaagtggcggaagtgatcctcgtcacccccgagcaggccattcattcgagcatcgccgccctcgcccttgaggccggggttagcgaaccgaccgtcaatcgcttctgccgtagtctcgaaacccgcggattccctgacttcaaactgcatctggcccagagccttgcgcacggcacgctctatgttaaccggaatgtcgatgaagacgacagcgttgagtcatacacgggaaaaatattcgaatcggccatggcgagtttagatcaggtgcaccattctctcgacatgtcggcggtaaatcgcgcggtggatctgctgactcaggccaaaaaaatcgcctttttcggcctcggctcctcagcggcggtcgctcacgacgcgatgaacaaatttttccgctttaacgtgccggtcatctattccgacgacattgtcctgcaacgcatgagctgtatgaattgcgatgacgatgatgtggtggtgattatctcgcataccggaagaaccaagagcctggtggagctggcgcagctggctcgtgaaaacgatgccatggtgatcgcgctcacctccgccgggacgccgctagccagggaagccacgctcgccattacccttgatgtgccggaagataccgacatctatatgccgatggtctcccgcttggcccagttgaccgtcattgacgtgttggcgactggctttaccttgcgtcggggggcaaaattcagagataacttgaagagggtcaaggaagcgctgaaggaatcgcgttttgataaagaaccattcgtacccagtgataatcaataaaagttgataacaagcagtaccccattacaccttcgataacgatccggctgtgcgacgttgcaggctggcgctaccgaatccatgttcacgcaacaccaaagttgtatcagtcaacggagtattacatgtccagaaggcttcgcagaaccaaaatcgttactaccttaggcccggcaactgaccgcgataacaacctggaaaaggttatcgccgcgggcgcaaacgtagtacgtatgaacttctctcacggcaccccggaagatcatcagctccgtgccgacaaagtgcgtgagattgcggcaaaactgggccgtcatgtggccatcctcggcgacctccagggaccaaaaattcgcgtatcgaccttcaaagaaggcaaaattttcctcaacgtcggcgataaattcctgctcgacgcaaaccttggcaaaggcgaaggcgacaaagagaaagtcgggatcgactataaaggcctgccggcggacgtcgtgccgggcgatatcttattgctcgacgatggtcgcgtgcagctgaaagtcctcgaagttcaggggatgaaagtgttcactgaagtgaccgtcggcggcccgttgtccaacaacaaagggatcaacaagctgggcggcggcctgtctgccgaagcgctgaccgacaaagataaagctgatatcgtcaccgccgctaaaatcggcgtcgactacctggccgtctctttcccgcgctgcggcgaagacctgaactacgcccgtcgcctggcgcgcgatgccggctgcgatgcgaaaatcgtcgccaaagttgagcgtgccgaagcggtttgcgatcaggatgcgatggacgacgtgatcctcgcctccgatgtggtaatggttgcccgtggcgacctcggcgtcgagatcggcgatcctgagctggtgggcatccagaaagcgctgatccgtcgtgcccgtcagctgaaccgttccgtcattaccgccacccagatgatggagtcgatgatcaccaacccgatgccgactcgcgcggaagtgatggacgtggccaacgccgtgctggatggtaccgatgcggtgatgctctccgcggagaccgctgccggtcagtatccttcggaaaccgtggccgcgatggcgcgcgtgtgtctgggcgcggaaaaaatccctagcctcaacgtctccaaacaccgtctggacgtccagttcgacaacgtggaagaagcgattgccatgtcggcgatgtatgccgccaaccacctgaaaggcattaccgccatcatcaccatgaccgaatcgggccgtaccgcgctgatgacttcgcgcattagctccggtctgccgattttcgccctctcccgccacgagcgcaccctgaacctgaccgccctctaccgcggggtgacgccggtgttcttcgacagccagaatgacggggtggccgccgcgcacgacgccgtcaatctgctgcgggacaaaggctatctggtctccggcgacctcgtggtcgtgacccagggtgacgtgatgagcaccatcggcagcaccaacaccacccgtatcctcaccgtcgagtaagcacggtagagataaaaaagcctcctgacggaggctttttttatttctttttcgggaacagctctttgcgtttgtagggctcaatttcacccggcttgcgcgttttcagcagcttcaggatccaggtatactgctcggtgtgcggcttaacaaacacttccacttcttcgttcatccgccgggcgatggtcgtatcgtcagcgtccagcagatcgtccatcggcgggcgcaccagcaccgtcaggcggtgcgtcttaccatcgtagaccgggaacagcggtacgacgcgggcgcggcacactttcattaagcggccaatcgccggcagcgtggccttgtaggtagcaaagaaatccacaaactcgctgtgttcggcgccgtgatcctgatcgggcagatagtagccccagtagccctggcgcaccgactgaataaacggtttgatcccatcgttgcgcgcgtgcatacgcccgccaaaacgacgacgcacggtattccacacgtaatcgaacaccgggttaccctggttatggaacatcgccgccatcttctgcccgccggaggccatcagcatcgccgggatatccacaccccatgcatgcggaacgagaaaaatcaccttctcattattgcgctgcatctcgtcgatgatcgctttcccctgccagtcgacgcgggcaaggattttctgcggatcgcgcaggcccagctcggccatcatcaccatcgcctgcggcgccgaggcatacatggcgtcgataatcgcttcccgctcgtactcgcttttttccgggaagcagtacagcaaattaatctgcgcccggcggcgcgagcttttcgccagacgccctaccagacgaccgagtttgccgaggagcggatcgcgaaaggatggcggcgtcagcgcaataccggcgaaggcaaagacccccagccaggcgccccagtagcgcggcagtaaaaaggatttttcaaacttagggataaactcaatattattttttttcgtttccatgcccaatccgcagatcgactgcttaatcaagataatgggatagtgtagcgagacgtcgggtatcctacaaaagaaaaagccggcgccctggggcaccggctttccactgaccggtggttagtcaaaccgcagctgcggaacgacctctttgacctgcgccagatagtcggtccggtcagaaccgctcagcccttcggtacgcggcagcttagccgtcagcgggttgaccgcctgctggttgatccacacttcgtagtgcaggtgtggcccggtagagcgtccggtattccccgacagcgcaatgcgatccccgcgcttcactttctgccccggcttcactaacagcttacgcaggtgcatgtagcgagtggtataggtgcggccgtggcggatcgcgacgtaatacccggcagcgccgctgcgtttggccacgactacttcaccatcgcccaccgccagcactggcgttccctgcggcatcgcgaaatcgacgccacggtgcggcgcgacgcggccggtgaccgggttcagacgacgcggattaaagttagaggagacgcggaactgacgcgccgttgggaagcgcataaagcccttcgccagacccgtcccgttgcggtcgtagaatttgccgtcttcggcgcggatggcatagtaatccttaccgtcagagcgaagacgcacgccgagtaactggctttgctcacgtttgccgtcgagcatttcgcgcgacatcaataccgagaattcgtcgcctttcttcagcttacggaaatccatctgccactgcatggccttgatcaccgcgctgatttccgtgctggtcagcccggcatcacgcgcgctggagacaaagctggcgccgacggtgcccttcagcacgctgttgacccaatcgcctttctgcagctcgctgctcattttaaaaccgttatccacacgggtataggtgcgggtctcgcggcgggacatctcccaggtcaggctctgcagatcgccgtcggcggtcagggtccaggagagctgctggccaatcttcaggttgcgcagctctttatcggcggaggaaagctgggcgatatcgcccatatcgataccgtactggttcagaatactgctgagcgtatcgccggtcgacaccacgtattcgtgcccgccggcatcgctatcggctttttcgtcgagctcatcctgaggaatggcttcttcttcctgcggggcctggtcgatcggctcggaggcttccggcagcagggaacggatctcgcttttttccagttcaatggttctgacgatgggggcggattccgggtggtaaatgtagggtcgccagacggcgaccgctaaggtaagaacgctaagcgaccccagcatgacgcgatgaggtcgtggcaaattgttgaatgcctgagtgacagcgcgggctatctgttgcacgtattcacttcctcgttaatctcctttcaggcagctcgaatactgattcgccagttgggtgaggaattgcgggtaactcgttttacccagcgtaattcctgtccccagtggatccagggtccccatgcgcacagacgtgccccgggcaacagcttcgataaccgctggcctgaactgtggctcagcaaaaacgcaagtggctttctgctcaaccagttgtgttctgatttcgtgtaaacgctgcgcaccgggctgtatttcagggttgacggtaaagtgccccagcgaggtcaaaccgtagtgtttttcaaagtaaccgtaggcgtcatgaaaaacgaaatagcccttccctttcagcggtgccagctcattgctcacctgcttgtcggtcgccgccagcgcggtctcgaactgctgcaggttgctgtcgagtttggctcgactctgcggcataagttccaataatttatcgtggattgcaaccgccgaaagccgcgctatctctggggataaccacagatgcatattgtaaataccgtgatggtgatcgccgtcacctttttctgctgcgccatggtcatgaccatggtgatcgtcatcgtcgtccgccccggtgatgagcagcggtttgaccccatccagctcggcaatcgtcacctttttattcgccgcaatgctttgcgtcgacttatccataaaggcttccatttccggaccaatccacaccactaagtctgcgttctgtaagcgttttacatcagaaggacggagggaataatcatgctcggaggcgccatcgggcagcagcacctgggtctcggtcaccccatcggcgatggccgccgcgataaagcccagcggtttcatagaagtcaccacggcggcgctggccagcggtacctgcgcgaacaaaaaaacagcgccaagtccagcgcaaagaagcgtatttttatgtaacataatgcgtctagtcatcgaaataagtgagtgtgatgtgatattataacattcactagcttgtgcaacccctaaattactatgacaaaccttgtaacgctggaaaatgtctcggtggcctttggccaacgccgcgtgttgtctgacatctcgctggctctcacgccaggcaaaatcttaaccctgctgggccccaacggcgccggcaaatcgacccttgtgcgggtggttctcgggctggtagcaccgacagagggtgttatcaagcgtgacgcacgcctgcgcatcggctatgtgccgcagaaactgcatctggacgccacgctgccgctgaccgtcagtcgcttcctgcgtttgcgcccgggcacccgtaaagacgacatcctgccggcgctgaagcgcgtgcaggcggggcatctgatcgatgcgccgatgcaaaagctctccggcggcgaaacgcagcgcgtactgctggcccgcgccctgctcaaccgtccgcagctgctggtgctggatgaaccgacccagggtgttgacgtcaacggccaggtggcgctctacgatcttatcaaccagctgcgccatgaactggactgcgcggtgctaatggtatcccacgatctgcatctggtgatggccaaaaccgacgaagttctgtgcctgaaccagcatatctgctgctctggcgcaccggaggtggtctccatgcacccggagtttatctccatgttcggcccgcgcggcgcggaacagctggggatataccgccaccaccataatcaccgccacgaccttcaggggcgaattgtactgcgtcggggaaacagccgctaatgattgaacttctgttacctggctggcttgccgggatgatgctggcctgcgccgctggtccgctgggctcctttgtggtctggcgccgcatgtcttatttcggcgacacgctggcgcatgcgtctctgctcggcgtcgctttcggtttattgcttaacgtcaatccgttctatgcggtgatcgtcgtgaccctgctgctggccggcgggctggtgtggctggaaaaacgaccgcatctggcgatcgataccctgctgggcatcatggcgcacagcgcgctgtccctggggctggtggtggtcagtctgatgtctaacgtccgcgtcgatctgatggcgtacctgttcggcgatctgctggcggttacgccgcaggacctgatcgccattgccattggcgtggtgattgtgattggcattctgctctggcagtggcggaatctgctggcgatgaccatcagtccggacctggcgtttgtcgacggcgtgaagctgcagcgggtcaagctgctgttgatgctggtcaccgccctgactatcggcgtggcgatgaagttcgtcggggcgctgatcattacttccctgctgattatcccggccgccaccgcccgccgttttgcccgtacgccggagcagatggccgccgtggcggtgggcgtgggcatgctggccgttaccggcgggttaaccttctcggctttctatgataccccggccgggccgtcggtggtgctgagcgctgcggtgctgtttattctcagcatgacgaaaaaagccgccagctgaaaatgaaaaagcccggtcacgctgctgaccgggcttcaccatgaactgctcaaccgcaacgcgctacggcatttccggcggcgtaatcccgaaatgattccaggcgcgcaccgtcgccattcttccccgcggcgtacgctgcagaaagccctgctgaattaagtagggctccagtacatcttcaatggtttcccgctcttcgccaatcgcggcggcgaggttatccagccccaccgggccgccaaagaacttatctatcaccgccagcagcagcttacggtccatatagtcgaacccttccgcatcgacgttaagcatatccagcgcctgggcggcaatatcggcggagatggtgccgtcgtggcgcacttccgcaaagtcacgcacccggcgcagcagacggttggcaatacgcggcgtgccgcgtgaacggcgggctacttccagcgcgccctcgtcgctcatctccagccccatatggcgggcgctgcggctgacaatatgctgcagatcggggatctgatagaactccagacgctgcacgatgccaaagcggtcgcgcagcggcgaggtcaacgaaccggcgcgggtggtggcgccgatcagggtaaacggcggcagatcgatcttgatggaacgcgccgcgggaccttcgccaatcataatatccagctggtagtcttccattgccggatagagcacctcttccaccaccggcgagaggcgatggatctcatcgataaacagtacatcgtgcggttcgaggttggtgagcatcgcggcgagatcgcccgccttctccagcaccgggccggaggtggtacgcagattcacccccatttcattggcgacgatattggccagggtggttttccccaaccctggcgggccaaaaatcagcaggtgatcgagggcgtcgccgcgcagcttcgccgcctggataaagatctccatctgcgaacgcacctgcggctggccgacatactctgccagcaattttgggcggatggcgcggtcagcggcctcttcaaagccgctgctgtctgccgataccagccggtctgcttcaatcatcccttacctcacaacgcagcgcgcagcgcttcgcgaattagcgtttcactgttggcgtccggacgcgcgatcttgctgaccatccggctggcctcctgcggtttatagcccagcgcgaccagcgcggcaaccgcttcctgctcggcatcgtccgccgttgggcctgccggcgaggtcagcaccagatcggccgccggggtgaacaggtcgccgtgcagccctttgaagcggtctttcatctcaacgatcagacgttcagcggtttttttgccaatccccggcagcttcaccagcgaggcgacctcttcccgttcaacggcgttgacgaactgctgcgccgacatgccggagaggatcgccagcgccagcttgggccccacgccgttggttttaatcagctctttaaacagggtacgttcctgtttgttgttaaacccatacagcagctgggcatcttcacgcaccacaaagtgggtgaagacgatcgcctcctgcccggcctccggcagctcatagaagcaggtcattggcatatgcacttcatagccgacgcccgccgtttccagcaacaccagcgggggttgtttttcgagaatgatgcctctgagtctgcctatcacgtggggctcctgcgttatggtctaagtatctggcggtatcataaaaaaaggctggatagatatccagcctgatttgcgattatcgtaagcgcccccgcgccagattgagccgggtctcgctgatctgagcggcattctggctgacatggcaatgggtgatggcaatcgccagcgcatccgccgcatccgcctgcggattggcgggcagcttgagcaaggtgcgcaccatatgctggacctggctcttttcggcgctgccaatcccgaccacggtctgcttgacctgacgggcggcgtattcaaacaccggcagcgcctgattggtcgctgcgacgatcgccaccccgcgcgcctgcccgagctttaacgccgagtcggcattcttggccataaagacctgctcaatggcgaaatagtcgggctggaactgggtgatgatctccgtcaccccggcgtagatcagcttcagccgcgacggcagatcgtccactttggtgcggatgcatccactgcccaggtaactcagctgccgtccaacctggcggatcacgccataaccggtaacgcgcgaccccgggtcaatgccgagaataatagccatcacgcgcctccggttaaccgtggatgcggctgcatcacagggtggctgcgacctcgtcggagatctcgccgttatggtacacttcctgcacgtcgtcgcagtcttcgagcatatcgatcagacgcagcagcttcggcgccgtctcggcatccatatccgctttggtggacggaatcattgagacttcggcagcgtcggctttcaggccggcggcttccagcgcgtcgcgcacagcgcccatctcttcccaggcggtgtagacgtcgatggcgccgtcgtcataggtcaccacgtcttctgcgcctgcttccagcgccgcttccatgatagtgtcttcatcgcctttctcgaaggagataacgcctttcttgctgaacaggtaggagacggaaccatcggtgccgaggttacccccggttttggtgaaggcgtgacgcacttccgcaacggtacggttacggttgtcggacagacattccaccatcaccgcggtgccgccaggaccgtagccttcataaatgatggtttccatgttcgcgtcttcatcgccgccgacgccgcgcgcgatggcgcggttcagggtgtcgcgagtcatgttgttagacagcgctttatcaacggccgcacgcagacgcgggttggaagccggatcgccgccgcccagacgcgcggcggtgaccagctcgcgaatgattttcgtaaagattttaccgcgtttggcatcctgtgccgctttgcggtgtttggtgttggcccatttactatgacctgccataaaaaactctccaaaaagcgcgccctttcaggcggcgttaattacaaattcttcaatcgcctgccggttgctccacgacttggtcagcgcagcggcttccgtcgcgctgacccagcgataggccagatgttcggtgaaagtaatctcccgctcatgaggcagcgcaagacagaaccagaattccgtattgcgctctacacccggcgcatagcgatgacgcaaatgagaaaatatctcgaactccaccgtgcgctgacagtcgattaaggtcagttgctcgcaggcaacgtcaatggcgacctcttcctttacttcacgcgcggcggcctgcagcgcggtctctccagcttccaggctgccggtgaccgactgccagaacgcgggatcgtcgcgccgctgcaacatcagcacccgtttcgtatcttcggcgtaaatcaccaccagcaccgaaacgggcagcttaaatgacatattacttgttctccagagacgcttttgcctctttctccacaacctgaatacccagctcaccgagcgccgccggattggcgaagcttggcgcttcggtcatcaggcaggcggccgcggtggttttcgggaaagcgataacgtcgcggatgttatcggtaccggtcagcagcatggtcagacggtcaagaccgaaggccagacctgcatgcggcggcgtaccgtacttcagcgcatccagcaggaagccgaatttctcacgctgttcctgttcgttaatgcccagaataccaaatacggtctgctgcatctcgccgcggtggattcgcaccgaaccgccgccgacttcataaccgttaataaccatatcgtaggcgttggctacagcctcttccggggcggctttcagctcatccgcggtcatatctttcggcgaggtgaacggatggtgcatcgccgtcaggccgccttcgccgtcgtcttcgaacatcgggaagtcgatcacccacagcggcgcccatttgctctcgtcagtcagactcaggtctttacccagcttcagacgcagcgcgcccagcgcgtcggccactactttcttgttgtcggcgccgaagaagatcatgtctccatcctgcgcgccggtgcggtcaaggatcgcttccacgatttcagcggtcaggaatttggccaccgggctgttgatcccgtccatgcctttggcacgctcggtcactttaatataggccagccctttcgcgccgtagatcttcacaaagttgccgtattcgtcaatcagcttgcgggtcagagaggccccgcccgggacgcgcagggccgccacgcgccctttcggatcgttggccgggccggcaaagaccgcgaattccacagacttcagcaggtcggcgacgtccaccagctccatcgggttacgcagatccggtttatcggagccatagcgacgttcggcttcggcgaaggtcatgatcgggaactcgcccaggtcgacgcctttcacttccagccacagctgacgcaccatcgcctccatgatctcacgcacctgcggcgcggtcataaaggaggtttccacgtcgatctgggtgaattcaggctgacggtcggcacgcaggtcttcatcgcggaagcatttaacgatctgataatagcgatcgaagccggacatcatcagcagctgtttgaacagctgcggcgactgcggcagcgcgtagaatttgcctttgtgcacgcgggaaggcacgaggtaatcgcgggcgccttccggggtggctttagtcagcatcggggtttcgatgtcgaggaaaccatggtcgtccataaagcggcgcacaaagctggtaattttcgcgcgggttttcaggcgctgcgccatctccggacgacgcaggtcgaggtagcggtatttcagacgcgcttcttcggtgttgacgtgattggagtccagcggcagcgattctgagcggttaatgatcgtcagatcggaagccagcacttcgatagcgccggtggccatgtccgcgttgatgtttttctcttcacgcgcgcgaacggtgccagtgacctgaatgcagaactcattacgcagttcagaggctaacttcaacgcatccgcacgatccggatcgaaaaacacctgaacgatgccttcgcggtcgcgcatatcgataaaaatgaggctaccgagatcgcgacggcggttgacccaaccacacagagtcacctgctgcccaacgtgggactgtcgaagctgtccgcaatattctgtacgcatgagatatcccttaacttagccgtcggcggattgtcgtctgccctgcaggcgacgaggtcgcagctttagctgatgtcacaactgaatgaaaaaaggcggctattatactggaaattctgtcgttcgataagtccgacgcacgatgtacgctgctttgctgcgcgcttaacgtccacactcacataaattaacaaaatttgttactcttttgctgaagccgcaaaggtattgtagccgcctgacaacagatgaagatacggggataccatgttagaactcaatgcaaaaaacacggcgctggtggtaatcgatctgcaggaaggcattctgcctttcgccggcggcccgcatcgggctgacgaggtggtggcgcgcgccgctcgcctggcagacaagtgccggcaacagggttcgccggtcatcatggtccgcgtgggctggtcggccgatttcgccgaagcgctgaaacagcctgtcgacgctcaggccggggcgcatacgctgcccgaaaactggtggacctacccggccacgctgggtaagcaggagagcgatatcgaagtgaccaaacgccagtggggcgcgttctatggcaccgaccttgagcttcagctgcgccgccgcgggatcgacaccattattctctgcggcatctccaccaacatcggcgtcgaatccaccgcccgcaatgcctgggagctgggttttaacctggtcatcgccgaagatgcctgcagcgccgcctccgccgagcagcatcagggcagtatgacgcatattttcccgcgcatcggccgggtgcgcagtaccgaggagatcctcacggcgctatgatttatattgggcttccccagtggtcgcacccgaaatgggtgcgccttggcatcaccagccttgaagagtacgcccgccactttaactgtgtggagggcaacaccaccctgtatgcgctaccgaagccggagattgtcgcccgctggtatgaacagactcacgatgacttccgcttctgcttcaaatttccggccaccatctcgcaccaggccgccctgcgccattgcgacgagttaagcagtgaattttttgcccgcctggcgccgctggcctcgcgcatcggccagtactggctgcagctgccggcgacgttcggtcctcgcgatctccccgcgctatggcattttctcgacggactgccgaaggatttcacctacggcgtcgaagttcgtcatcccgagtttttcgccaaaggggaagcggaacagcagctcaaccgcgggctgcacgagcgtaacgtcaaccgtgtgatcctcgacagccgcccggtccatagcgctgcggccaccagtccggcgatgatcgatgcccaacaaaagaaaccaaaggtgccggtacatgcggtgatgaccgcccgagagccaatggtgcggtttatcggcggtgacgatatggtccataaccgggaactgtttcgcgtctggctgcagaccctggcgaagtggcatcagtcggggaccccgtggttgttcctgcataccccggacattgctttcgccccggcgctggtggataccctgtggggtgacctgcgcgctgccctgccggcggcaggaaatgcgccgtcgattccgcagcaatcttctcttttctgatatcctgctatcatatccggagccatctgccagagttaaagggagttttcgtatggtcagcgcgctgtatgccgttttaggtgcgttattgttagtgaagttctcatttgacgtggtgcgtctgcgcacccaataccatgtaggctacggtgatggcggctttagcgagctgcaggttgccatccgcgttcacggcaatgccgtcgaatatgtgccgattggcctcattttgctgttatttatggagatgaacggcgcccagacctggatggtgcacgtttgcgggattttattgattgtcgggcgactgatgcactcctggggttttcatcaccgcgtctactactggcgccgctccggcatgagcgccacctggtgcgcgttgttgctaatggtgctggccaatctctggtatatgccctgggagttggttttctccctccgttagcgcacaatacgccgttttcgttttttcgggtttaacgttatgtctcaccgcgatacgcttttttccgcgccgattgccagcctcggcgactggacctttgatgaacgggttgctgaagtcttccccgatatgatccagcgttctgtgcccggctactccaatatcatctcgatgatcggcatgctggccgagcgcttcgttcagcccaacactcaggtttacgatcttggctgttcgctgggcgccgccaccctctccgtgcgccgcaatattagccatccgggctgtcgcattatcgctatcgataactcgcccgcgatggtggagcgttgccgtcgccatattgacgcttataaagcgccgacgccggtcgaagtgattgaaggggatatccgcgacgtgaccattgaaaacgcctcgctggtgatcctgaactttactattcagttccttgagccgggcgatcgccaggcgatcctcaacaaagtctatcaggggctgaatccgggcggcgcgctggtactctcggaaaaattcagcttcgaagacgcccacgttggcgaactgttgttcaatatgcatcatgactttaagcgcgccaacggctacagcgaactggagatcagccagaaacgcagcatgctggaaaatgtgatgctgacggactccgtcgaaacccataaagcccgcctgcgtcaggctgggtttgaacatgccgaactgtggttccagtgctttaactttggctcgctggtggccgtgaaagccggggagcaggcatgatcgacttcagtaacttctatcagctgatcgccaaaagcccgctgtctcactggctggagacgctgcctgcccaggtagccgcctggcagcgcgatgccctgcacggcaagtttcgtgaatgggagcgcgccgtagaatttctgccggagctaacgccctggcgtctggatcttctgcacagcgtcaccgccgagagcgaaacgccgctcagcgaaggccatcagcggcggatcgaaaatctgcttaaaaacctgatgccgtggcgcaaaggcccttattcgctgtacggcatcaatatcgataccgaatggcgatccgactggaaatgggagcgcgttctgccgcacctgtccgatctcactggccggactatcctcgacgtgggctgcggcagcggctatcacatgtggcggatgatcggcgccggcgcacatctggcggtcggtatcgatcccacccagctgttcctgtgccagtttgaagcggtgcgtaagctgctcggtaacgaccagcgggcgcatttgctgccgctgggcatcgagcagctgccggcgctggaggccttcgacaccgtgttctcgatgggggtgctctaccaccgccgctcgccgctggaccatctgtggcagctgaaagatcagctggcgccagggggcgagctggtgctggagacgctggtggttgaaggagatgaaaatacggtgctggttccgggcgaccgctatgcgcaaatgcgcaacgtctattttatcccctcggcggcggccctgaaaatgtggctggagaagtgcgggtttattgacgtgcgcatcgtcgacgcctgcgtcacctcgacagaggagcagcgacgcaccgaatggatgacgaccgaatcgctggccgatttcctcgacccacaggatcagcgcaaaacggtggaaggctatccggcgccattacgagctgtgatcattgccaccaaaccggaaacccagcagtcgctggcgaaaaaagcgagataaaaaaaggcccctgtttaatgggcaggggcctggtacgggcaatcatcatattgggcgacatgatgtgcagcaaaaaaccgtttaacttctccaggcggagataatccttttcatctccgccaccgctgcgccattcacggcgtagcgtctgtattcatcggcatcgggatcggctgacatcgaaacgcccggatgacgaaagcgcatttccgacggcaaccagtggccagcagagctatggacctctttcacccccgcctgcagaaacagcggcaggttcgcggcgcggactcccgcaccggccataatgattggagtatcccctgcggcaataagttccgtaattaatgaaatacctttctccgccgaggattgctgaccggaagtcaggatacgtttaacccccagcgtccccagcgttttccaggcctgacgcgggtcagcgcacagatcgaacgcgcgatgaaaggtcaccgccagcggccccgccgcggccattatttttttcatccgcgggatatcgacctggccatcagcatccagcacgccggtcaccagcccgggaaagcccagatcccgcaccatgcgaatatcgttaagcatcgcggcgaactcttcctcggtgtagcagaaatcgccgccgcgcgggcgaacgatcggatgcaccgggagagtaatcgcctcgcgggccgagaccagcaccccataagagggggttaatcccccttcctgcggcgcggcgcagagctcaatacgatcggcgccgcagcgctcagcctcccgggcgcacgccatgctgtagcaacacacttccagtaccgccattcctctctccctgatccagacaacctttgcagcatggcacgatttcacgcggcagacgccgcgcggcttcacactgttacgtatcggcttgctcgctggcgacgatttgttcaatagaccacggatgaaatttgaccgtcacgctgccgtcggtcaccgccagggtggggttcggcaggcgctcatgctcccctttcggcgagctggttttgaccacgatccccggctggctgagtccgtcatcggccagcagcgccagagcgcgggcatttaaggttgccggatcgccgggcaggacgatttcgatatgctcccagccttcatggggataacgcttctcacccggccacggcagctcaacgatatggaagcgccagtgcgccacgcagaccggctccgccagtttgaacaggcaaatgggccggccgttgatcatattctccgacagcagggtgccgcactgctccagaccgcggcgccagcgttccgcagtggtattctgatgacagcgcagggagatatggtcggcgtcgagcccggcgatctccagtcccagtcgcgcagtgaagcgctgaagcgcatcggaaaatcgcgagagatccgccgtaatatcggccagttgttcattttgctgccagtttgccatgggtttgctcgtcaataatgctcgtcagtaatgaaaaggtaatttaccgtgtttcgacctgcggaccaaccgccgccccgctgatgggcaactgaccggcgatggattgcgcacgccggcgcgccgcgcgtaatgctgacggacggggacaaatgcagtatactcccgccctaatttgtccacattatggcgccgcctccctcgggggcaggcgcattacacgtaaggtattccggtgaatattcaggctcttctctcagaaaaagtcagccaggccctgatcgcggcaggcgcgcctgccgattgcgaaccccaggtccgccagtcagcaaaagttcagttcggcgactatcaggccaacggcgtgatggctgtcgccaaaaagctgggtatggcgccgcgacaacttgcagagcaggtactgtctcatcttgacctcaacggcattgccaacaaggttgaaatcgccgggccgggctttatcaatattttcctcgaccccgcgtttctggcggacaacgtcaaccgcgcgctgcagtctgagcgcctgggcgtcacgaaaccgcaggcgcagactatcgtcgtcgactactcggcacccaacgtagcgaaagagatgcacgtcggccatctgcgttcgaccatcattggcgatgcttcagtccgtaccctggagttcctgggtcataaggtgatccgcgccaaccacgtcggcgactggggcacccagttcgggatgctgatcgcgtatctggaaaaacagcagcaggaaaacgccggcgaaatggccctggccgacctcgaaggtttctatcgcgaagcgaaaaagcactatgacgaagacgaagccttcgccgagcgcgcgcgcagctacgtggttaagctgcagggcggtgatgagtacttcctgcagatgtggcgtaagctggtcgacatcaccatgtcgcagaaccagatcacctacgatcgcctgaacgtcaccctgacccgcgatgacgtgatgggtgagagcctgtacaacccgatgctgccggggatcgtcgccgatctgaaagccaaagggctggcggttgagagcgaaggcgctaccgtggtcttccttgatgagtacaaaaacaaggaaggcgaaccgatgggcgtcatcatccagaaaaaggatggcggctacctctataccaccaccgatatcgcctgtgcgaagtatcgctatgaaacgctgcacgccgaccgcgtgctctactacatcgactctcgtcagcaccagcacctgatgcaggcgtggaccatcgtgcgcaaggcaggctacgtgccggactcagtgccactggagcaccatatgttcggtatgatgctggggaaagacggcaagccgtttaaaacccgcgccggcggtaccgtgaagctggcggatctgctggacgaagcgctggagcgcgcccgtcgcctggtggccgagaagaacccggatatgtcggctgacgagctggaaaatctggcgaaagtggtgggtatcggcgcggttaaatatgccgacctgtcgaaaaaccgcaccaccgactacgtcttcgactgggataatatgctggcgttcgaaggcaacaccgcgccgtatatgcagtatgcctatacccgcgtgctctccgtgttccgcaaagccggcatcgacgaaaacgcgatgatcgacgcgccggtggtcatcgccgaagatcgcgaagctcagctggccgcgcgcctgctgcagtttgaagagaccctctccgtggtcgctcgcgaagggacgccgcacgtgatgtgcgcctacctctacgatctggcgggcctgttctccggcttctacgagcactgcccgatcctcagcgcggaaagcgaagagacccgcaacagccgtctgaagctggcgctgctcacggcgaaaaccctcaagctgggtctcgataccctcggtatcgaaaccgtcgagcgtatgtaacaagcaacccggcgaaagccgggttagttttattcggcgcctcgccagcggggcgccctgctcagaagtacttgcgtagatactccgtcagacaaaggatcgccatcgcctgaccgtagggcatcgaggtaagcgggatctggcgataaaagtcgaggtctgaccccatcccggtgccaaatgaggtctgcagcagctccccctgcggcgaaatattctgcacaatcccgcgaatcgctttttcagccaccccggcgtagtgctgcccgacgtaacgcttgcgcaccgctttgagaatgccgtaggcaaagccggcggtcgccgaggcctcaagataagagtgcgggtcgtccagcaaggtatgccacaggccgctgtcgtcctggcattctgccaaggcggcgatctgtgcgtcgaggactgtaatcagatagcgccgtaccgcgttcccctcggggagattcaccagttccagaaaatccgggatcaccatggtgagccagctgttgccccgcgcccaacgcgcccgggcaaagttatgccgcccctcatagttccagccgtgaaaccacagcccggtctcccggtccatcaggttctgcacatggagcaggaactggtaggttgcctcctccacatactgggggcggttaagcagcttgccaattttggctaacggcaacacggtcatcatcagcgtgtcatcccacatttgctgatggttctcctccgccagagtcatgtgctgcataccgccctgctcggtgcgcggcatctcgtgcatcgcccactccgcccagctctccagccacggcagatacgccatacggccggtctcttcaaagcggtaagccagggtcagaaacggggccatagtattgacgtttttggtcgttgctccctcggcgaagcggtcggcaaaccagcgatcgatgatatcacgcatctcgatatcgccggtttgctggtaatactgatagatgccgtacagcccaacgccgtgggtccactcccagccggcccagcctttggtatcgatcacgcgcccgtcatccaggcgtagtaaaaattgcccgctctcatccttaatattcaccaggttttgcgtcacgttgcggatcagcgcctgcagttcgctacgggcgataaaacgctcaggctgacgcagtaatgggctatgtttgaccggccaaactttcatgttgttaacctcgggtatatgtcgaattcaaagcgccgcccttaatgagcgccggggcagcaggtttatgacgattcagatagccaatattgttattgccccacagacagtcgtaaggcatccccgccagcagctcgaccaccgcgcggtgttccgcactggtctgttccgactgagcgtagccgagctcgcgcattctgagggtctcgctgcgcaggacgctgtgggtgtgcaggttgagcttgaagcgcagcgagacgaggaagccgcaggctaacaccaccagagtgccgacgctgaggatcagcagaatggtatggctgaccccttcaggctgtattttttgcccggaaacgaaccccgacaactgcataatgatccccaccagcatcaccgcccccgcctgcgaggctttgcgggtcagagtcatgatgccggcaaaaatcccctcccggcgctggccggtgatcgcttcgtcgacgtcggcaatataggtgtaggtattccacggtacgtaatttatcccgccgcgtcccagtccggcgacagcagagatgagcagcaataaggaatagacgtcgctcagtccggcgtaatagagcagcgcgtaggagagtgagctcaggccaaacaggaccaccaccatgcggtacgacggcgcggggccaaaacgaatgcacagcgggatcatggcgattaccgcaataaactggaagatggccatcgtccccagcaggttcgaggcgacggcggcttcctgcatcagaacaaagaccacgtaataggtaaacacggcattgaagacgtcctgggcgatatagccccccagatacatgccgaggtgctggcggaaaatttttatccgcagcgtagaactcagctcaatcaccaggcgattgaggctctgagcaagggttaagttttgtttttccgcttccgcccgcagggccgcttccgaccacgcctcccgcggtcgttcccaggtgaaacaccagaccagagtcagcatcaccgcgcacagcaccgagaacaccagactggcatagaagaacgagctggcattatctttgccgagccaggagagaaggatccccggcaggaaggaggctaaaatcgccgacatctgcgccatcgaaatgcgcgcgccggagaatttggttttctgtttaaagtcatcggtcatctccggcaccagcgtctcatagggcaccagaatcatggtatagaccatatcaaacagcagataggtcgccaggtagtaccagaagcccatctcgccgacccacatcgctgaatagctgaatacgcaggggatgccgagcagaataaagaattttctgcggccgaagcgcttaccaagccaggtggtgccaaagttatcggtgagaaagcccatcagcgggcttaccaccgcgtccagcacgcgggcggcagcaaaaataagcgtggcctcaatcggggtcagtccgcaaaaggtcgtgtaaaagtagagcagccatgcggcggttaacgccgtcgtgccggcgccgagaaaatcgcccgcgccgtaggccagatagttagccagtccaatttttcgtgttttcatcgccgtgatcctgtgtctttttttaaaagaacgccgacaatcgttccggatttgccaccggaagggagtgggtacctggctacactaaaagctgtgaaaggaggttacctttgtacttttgccacggaacagtcgccggtggcaaaagtacaaagagatgacgtccccacttcactcatttataaaacagcatttctttttaatcaaaagacaggttcattgatgtgatcaggctggaaggtcgccgactaacgaacaggctcgcaaatcccgggatcggcccttgcgcagtcggggaaacaggagtaaagaatggaagaaagggttattccgcgtatctcaaggaggccagatgccttatacccatctgctggttgccgtcgcgccaacgccggagagtcaggtattaattaaaaaagcggtgtcgattgcccgtcccgttaacgcgaaggtgagcttaatcactctcgctacggatccggagctgtataaccagttcgccgcaccgatgatggaaaatctgcgcgaagtgatgcaggaagagacgcgggagtttctcaatgagctggctcgccacgcggactacccaatagaaagaatgaccatcgcctgcggcgagctaggccatcatattaaggacttctgccggtcgcaccgtgttgatctggtgatctgcggcaatcacaaccattccctcttctcacgcgccacctgctcggcgaaaagtatcgtcggcagctgcggcgttgatgtcctgttggtttcccttgaaaagggctaacgccggttagcccttttcctgaactaggccagtttagggaaggtggctatcttcccccgcagacggctctcctcgctgcgcggtgaaatatgctgcagatcctcgacaaagcgcgcctgccagttatgaatatcattttctctgatcacgtccagcatcgctgaatgacgggcgatacgttccgccagcggcatgctgagcgcgcgatccagcgcggcggcaacctcgtcgcgatcgtaaggattgacgatcagggcgctggtcagctcctgcgccgccccggcaaactgcgacaggaccagtacgccagggttatccggatcctgcgccgcgacgtactccttcgccaccaggttcataccatcgcgtagcggcgtcaccagcccgacgtcagagtagcggaagaccttcatcagcagcttacgatcaaaatgctggttcagatagtagagcggtgtccagccaagctgaccaaactgtccgttgatgcgtccggctgcggtttccagctggtggcggatatcctgataggcctgcacatcgccgcgggaggtcggcgcgatctgggtataacggattttgccgtggtgctgagggtacttctcgagcagcgtctcgtaggcgaggaatcgctccggcaaccctttcgaatagtcaagacgctccacggagaagatattcttcacatttttcagctcgttcttcagctgggccagcttcggcggcagcggacctttagcgttgcgcgtaatttcgtccggatcgatccctatcggataaacctcggtactgaacgccttaccccatgcctgatagcgtttatcgccgaggtcggataggcgagtctgcatagcaatgctgtcgagaaaagcggttctgtcgctttcggtctggaagcccagcagatcgtaatcgcacagttgctccagcagctcagcgtgcggcggcagagcgttaaaaatctccggcgtcgggaacggaatatgtaagaaaaacccgatgcgattgttcactccgcgcttacgcagctcgctggcgaagggcagaagatggtaatcatggatccacagcgtatcgtctggctcaatcagcggcagcagcttgtccgccagcatggcgttaacccgcagatatccctcccaggcttcgcgctgaaagctgaccagatcaaggcgatagtggaaagccggccacagcacggcgttagagaactggttgtagtattcatcatggtcccgttcattaaggttgaacgacgcccatgaaatattcccgcgggagacctgcttgagcggctgctggtcatcgccaatctcgccgctccagccaaaccacagaccccccgccgctctcagtgcccccaggatgccgacggccagaccgccagcgctcgattttttatcgtccggtaaggcgatacggttagagactacgactaaacgactcatggtcatccctcctttcggtttgcgcgtcatacgccagatgttgcaaccacgtccttacagcggcggcatccgccaaccgccaatgcgcctgagtttccccggcgccaacttttaccgacattccctgcagttgattaacgacgctgaatcccgcctcgtcggtcaaatcatcgccgacaaaaaccggttcgcggccggcgaatggcgcctcctgcatgaacgcggtaatcgcctcccctttgttgacgccgcggggtttaatctccaccacgcacttgccaagctgtaacgccagcagcggatagcgctgaacaatccgctgcgccagctccagcacggcgctctgctgctgcggggcctggcgatagtggagcgcgaaagccatctctttactctccagctcacatcccgggagcgcttccagcgccgacgtcagctcagccgcgatctcatcgcgcagcgctgtcggcagagagacgatgtaggttttaccattgatatcacggcgctcggccccgtgaacgccggccagcggtagccgccagggatgggttagcgcgtcaagttcagccattgagcgccctgaaatcaatgccaccgcgcccccctgctgctgggccagcgcattgagcgcctgcagcgtgctgtcgggtatcaccacctgatcggggtgcggctggatatcggcaagagtaccgtcgaggtcaaagaaaaaagcgtagtttccggttagcgcaggcggtacagatatctggttatccaccctgtttcctccttatcatggccagccgaagctggttgttaattatatgtgagccatgtaagtatagacagtgtgaccaacctcgccatttttgatagttaccgccagcgaaacgggcgctggcggcaattactctgtaaactaaaaagttgggttaaaattcaggccgcacgtttggctttttgtttgtagcggtcgaagatcaccgccgccagcaggatcaccccgcgcacgacgtattgtgagaatggcgagatattcagcaggttcatcgcattttccacggttccgaggatcaggatcccggccaccacgtaggagatcttgccgatcccgcccttgagcgacaccccgcccagcacgcaggccgaaataacaatcagctcatagccaatcgaggtcatcggctggccgctggtcatgcgcgacgccagaatgatccccgctgcggccgataccagaccggagagcacaaagataataatcttggtgcgcaccaccgggacgccggccaggcgcgccgcctcttcattgccgccaatggccagcgtattacggccaaaggtggttttgtttagtaataatccgaaaaccaccaggcaggcgacggtcagccagatcggcgccggcagaccaaaccagttggcgtagccgagggtgaagaaacgttcatcttcgatccccaccgctttgccgtcggagataatataggccaggccgcggacaatctgcatggtggccagcgtggtgatcagcgcgttgatcttaaggcgcgcaatgacaaagccgttaaccaggccactaagcgcccccagcaacaggcctgcggcgatccccagccacaggctttcgctgagattaatcaccaccgcggtggtgaccccggcgcaggcgataaccgacgccaccgacaggtcaaaatcgccggaggccaggcaaaacagcatgccgcaggccaccatcccggacatcgagatcgccagccccagccctttcatattgacgaatgaagcaaagttgggcacaaaaatcacacagccgataaacagcaccgcaaacaccaccagcatgccaaactgatcccagatgcgggcaaagctaaaggttgagcgggtagccccggacgtagtcactgatgacatcatttactccttactcaggcgacagcctggctcactgttggcatcgcaaggcttaacgcctgctgttcattggcttcttcatgcagcagttcgccggcgatttgtccttcgcgcatcaccacgatgcggtcagcgacgcccagcacttccggcaggtcgctggaggcaaacaccacggcgacaccggaggcggcgaggccatagatcacattgtaaatttcatgtttggcgccgacgtcgatgccgcgggttggctcatcaagcaggatcaccttcatctcttccgacagccagcggccaaggatcgctttctgctggttgccgcccgacaggttcataatcagctgttccgggcccggcgttttaatattcagcgactggatatgttgatcggcgttgtccgcctcccaggcgttgttgatcaggcagccagcgtgaatatgcttgcgccgggcgctgatattgatgttatcccgcacggaatgcaccggaataatcccctccgctttacgatcctccgggcacagcatcatcccggcctggatggcctgggccggtttgcgaatggagacgggctggccatcgatatacacctgaccgccggttatctgcgtgccgccaaacaggcctttcattagttcgctgcgcccggcacccaccagtccgaacaaaccgacaatttcaccgctgcgcaccgagagactaaccggcgtgcgcacgcccggcgctttgacctcctccaggcgcagccgctcctcgccataggggcgaggcttccagccataaatatcgcccagattgcggcctaccattgcctggaccagggcgtcgtggctgacgctcggcatatcgtcaaaggtgcaaacgtagcggccatctttaaagacggtgatggcatcgctgagggcaaaaatctcttccatccggtgtgaaacatagatgatgacccttccctcctcccgcaactcgcggatgacgcgaaacaggttgtcgatctctctggcggagagcgagctggtcggctcatcgaacgcgataatcttggcgttacgcgccagcgctttggcaatctccaccatctgccattgaccaatggagagatatttcagcggcgtctccgggtcgatatccagacccagatgctccagctgcaggcgggcctcatagttgagcagcgagcgattgacgatgccgcctctgtgcggcagctgaccgagatagatattttcggcgacggtcatctccgggatcagatgcagctcctggtagatgattgccacgccggcattcagcgcctccatggtattggcgaatgccatctgctggccgccgatctgcagatggcccgcggtcgggatatagttgccgctgagaattttcaacagcgtcgatttgcctgcgccattttcgcccatcagcgcgtggatctgtcctggatagcagtcaaaactgatatcggacaaggcctttacgccagggaacgtcatggtgatgccgcgaaatgagagataaggggtagactgttgcataacgactccgctcttctgcactcagcccccgcgccgcggcgggggccagtttaatcaggctgttacagcccttttttcgccagctcttctttgaagttatcgcgggtaatcagcaccacatcggtcaccgccgtgaacttcggcggctcgacgcccttggtgacccagttgtatagcatttcgctggttttgtagccgtggatatccgggcttggcagcagagaaccatagaagccggtcggctgcgccttcgacagttcgttgacggcatccacgccgttgatgccgatgccaatcacatcgggagctttaaagccctgaccttcggtcgcgcgcacgccgccgaggacggtgttgtcgttcatcccgacgatcagccagtgtttaacctgcggatgctggaccagcatcgagttaccggcgtcgaacgctcccgggatatcgttggattttgtcggcacgcggtagatttgcgcgtccgggaagccggccgccttcagggcatcgatggagccggtggtgcgacggcgcgcggtatccagctcatcggcggtgatcgccattacggcggtgtctttgacatcccagccgcgcttttgcatctctttatagagttcctgcccctgacgggcgccaatttcgctcgccgccatcatcaccagcggtacgctctccatcggtttgcccttcgcattgacgaactggtcatcgacggtaatcaccttcatgtcatagccacgcgctttggcgacaatcgccgacccgagcttgggatcgggggtacagatgacaaagcccttcgcgccgctggccgccaggctgtcaatggcattcagggttttctctccatccgggaccgcaattttaataacgtcaaagcctaaatcttttcctgctttatcagcaaatttccactcagtctgaaaccatggctcttccggctgttttaccagaaaacccagtttaagattttccgccatagctgattgtgacataaccgcagcgagaccaatggccgccagcgctttagtaaatttgtgcatggtaaactccagctttaattcgctttcatgtagggaaaaatcggaattaacaatttaatcggcatcaaaacaaggcattagaaaaatcgcattccccactgccgttgttagagtagtaatacccggaaattatttctccatacgagagcattatcacatcgcggaattacagtaattgcgtacatacatttagcaaaaaatgacataaaaaatgacacaattgtcatacaattttaccggggcatagcaggatcatctataccatcagcaggcttatccttgtgttgtcagaggatgtttaacggtgggttaaagcactgttatcatcagcgattgacggcgctgctacgggcgatcgcctgtgcgccactcaaatggcaacccacctcgcaccactgagccacatggcccgcttaatatcgcgaaaaaacggatctttggcgtaatttattgcgaaaagaaaaaatatattcctcttgataaaagcgcctgcaacaaaaaataaaaataatgatcatcaacctgaaacattactaatgaaataacttattccgttctcttctacgacgaatctcgtagtcaaatacttatatcttataaccaatctgaaaccagcgaccccctgccaacggcgcacaatctcagccctggtagtttgcacaaataatggtgtaacaaaacgtaaattaccgcgcttgagagttttcttaatttcgttgagcgagtattcttaaatcgtcggcaaatggaaaaaatacccgactcatacggaatgtgtagagttttattattctgcaacagtgccgcgtgtcactattttatcttgtagttatccgcaggatccgctgacgcgcaccagtaaccccttcccggttaataaggatattttttatggcagttccaggaatggcacaaaagctaaacacccaaatgaatcttgagtttcacgcctctaacgtttacctgaacttaagcgagtggtgcgcccggcatcgcttcgacggcgccgcgacgtttctgcgcacccgcgcgcaaagcagcatcaccctcaccatgcgcgtatttgactacctgaaaaaagccggcagctggccgatcgtcaatcccgaccacgcctgtaaccctgagtgcacctcgctggaagatctgtttacccaaaccctgagcgattaccaacagcgcagtcgtctgctgagcggtctcgctcaggaagccaaagcgcaaagcgatgacagcacctggcggtttctcacgctgttggcggaagagcagcagcaggatggcctgctattgcaaagcgtgcttgaggaaattcgtaatgccgataaagccggtctcgggatggagcagaccgatcggcgtctgatggctatcgttggagaagcgcagaaagcgcattaatcaagcctttatcgctctgccagggggagcgcgtctgcgctgccccgcccggtttattaatccattacgtctattttttcttccctattattcctttcaagaataaaaaagttttaactcgatcccattccctcatcaccgttaccccataagggggattagtgagcgcggtcactttttgacgaaccataaagaaatataaaaacagcgtttcaaaaatataaaacacgaggtttattttttatggctagatacacggcttcagcctctgaagggctgcagggaagaccgatcttgttacgccatcagttagcctacggcggcggaaatctgttagggagcggcgcactggcgataagcggcgcatggctactctatttttatacgaccttttgcggcctgacgctgatcgaggcctcatttatcttctccgtcgccagcatcattgacgctatcagcaacccgctgatgggctatctgacggataattttggcaaaacgcgcctgggcaagcgcttcggccgccggcgtttctttctgctaatcggtattccgctgatgatgttctacccgctgctgtgggtggaaggcctgagtttctggtactaccttagcacctatgtggtgtttgagatcatctacacctctatcatggtgccttatgaaacgctggcgacagagatgaccgatgatttctcactgcgttcaaaactgaccggctataaagctatctttggtaagctggccaacttcctcgcggcgtttattcccggccagttcattctgctgtatggcaaagattctgccacccctttcttcctcaccggtctgacctatggcgcgatcctgatcgtcgctatttcctgcctgtggttgtgcagctgggagcgtgagcgcagggaagaggtggaaaccagcgcgaaaaaaggactgctgagcaccctgctgtcgctggcgaaagatatgcgttcgactttttatctacgcgtattccgcaaacatcttggtatgtacctgtgcggctttggcgcggaatggctgtttgcctccatcttcacctatttcgtgatcttcgttctacaacacgatccagcgatggtggccgggctgaacagcctgaactcgattctgcagctgatctctacggcgctgtttatcggcctgtgcgtgaaaaagggcttcagcaaaccctatatcctggcgctggggatcgtcattttcgcggttctgctgtatacctcgctgtggtttttccatctaccgtccggcctggcgacagtgctgatgttcggcattaccgtgctgttcggcctgggtaccggcggggtttactatataccctggaccgtttacaccttcctggccgatgtcgatgagatctacaccggacgccggcgggaagggatctatgccggcgccatgaccttctcaggaaaaattcttcgctcgattgtggtgttctcgatgggggcgatcctgagcttctacggtttccagtcaaaagcgcacagccaaccggaaagcgcggtgaccgctatcgcagtggtattctgcgtcggggtgatcgcattagccctggccgccatcgtcttcagcaagcagatgaagctggaccggaaggcccatctggtggtgctgcaggaagtcgcgcggataaaagcgggcggcaaaattagcgatattgcgccggacgtgcgggttatcgtggaggatctggtcggccatcgctacgaagagtgctggggcaacagcaaattgttcaaagatgctgcccctgcgcctgcgcagaccgtcgtttcccattaaagaagaaggccccgccggtatccggcgaggcctggtattaatgcgtttcttcctgtggagtaaacttcagctcaatcaacgcgatcgctttttgcaccgcgcgaagggtcaccggatcggcagaggccggatggctggcgaagtcgatagctttcagctgagtggtcattttttcacgcacttccaccggcgcaatgacgtcaatgacatcgaggatctgtttgataaccagctggcaggcaaccacatcggaaaccagctcgtcgtgttcggtaagatgttgagacattaattactccttttttcaggagcgtaatagtaccctaaatcgttaacgataataaaacctgccgtcgcaggtttttttatctaccctactggctggcgggtcgtctcctgccgctttgcacaggatcacactcttgatggcagtgacaacatgaataccgcgatctcttcccgcgatgaacgtgctttttcagcgccggcgctgctggtggcaggtgccttttttatggagtttctcgacgggacggtgatcgccaccgccctgcccgatatggcgagggattttggcgtcaccgcggtcgaactgaatatcggcatcagcgcctatctgattacccttgcggtcctgatcccggccagcggctggatcgccgatcgcttcggcgcccgggctatttttactctcgccctggcgatctttacccttgcctcggtcttctgcggcctctccaccgaggtgcatatctttgtcgccatgcgtatccttcagggagtcggcggcgcgctgatggtccccgttggtcgccttgcggtgctacgcaccacgccgaaacaccagctgatcaaggccatcgccaccctgacctggccggcgctggtggcccccattatcggcccgcctttgggcggttttataacccgctacgccagctggcactggatcttctttatcaatgtcccgctgggccttgccgccatcatcctttcgctgcgcattatccctgatattcgcgaaacggaacggcgctccttcgatctcagcggatttatcactacctcggtcgcgatggtcagtctggtgaccgcgatggagcggctcggcgatcgccagccgcagatctggccgacgctggctctcgccgcgcttggcttcggctgtctgttatattccattcgtcatttccgccgggcggcggcgcctatggttcgtctcgacgccctgcaggtgccgacgttccgggtgacaatgtacggcggctcgttgttccgggcctccatcagcgcggtgccttttctgctccccctgctgttccaggtgggattcggtatggatccttttcattccggcctgctggtgctggcggtgtttgtcggtaatttaaccattaaacccgccaccacaccgctcattcgctggctgggctttcgtcggctactgctgatcaatggcgcgttgaacgtctgttcgctgctggcttgcgcgctgcttacgccgcagacgccggtctgggccatcatgctgatcctttatctcggcggggtgtttcgctcaatccagtttaccggtgtaagcacgctggccttcgccgatgtccccgccgcgcagatgagtgatgccaatacgctgttcagtaccgcgtcacagctggcggtagggctggggatcacgctcggggcgattggcattcgcctgggcgagcaggtcggcgactggctgcatcttactgaactaccggggatcagcttccgcctgtcgtttgtgtttatcgccttgatctgtctggtagggatgatcgacagcctgcatctggccaaaacggccggcagcagcgtgtcggagaagaagaaatagaagaaaaaataaacgacggaagggccagcggcgctggccctgatgacggttaagcgacgatctggcgaacaaagtcttcgattgctttatcctggcagttttcgaagaagcactgctggaagcgtgggccggagactgcggttttcaccagctgcggatcgatggcgcgcagggtatcgaggtagttctcttttactactgctgctttgacctggttgaggatcccggcattgcgcacctgcggttctttgcgctccggcggatagccttcgccgttgcggccggtaaaggctttttcaaagataaaccgcacattcagttcggcgccccaaccgaagcctttggcaaacggcagcgacagcgcattaccgttgttgatctgggcaaacaggaacgcatccgccggatcgatacagtagccgcagaccacgcccggatggatgttcagcgacatcagcgccccctgaccggtaccgcagccggtgaccacgaagtcaactgctttcgaattcagcagaatactggccatgatcccaagatggatgtaggtcagatgatgatcgttctcatcgctcatgccgacgttatagaccgggaatcctttttcgtcggcaaccgcgttaagctccttgaggatgatggcgtttttgttcgcctggctgttctccatcatcagtgcaatcttcatggtttactctcctgaatgctgtgcgggcctgcccgcagaatgtcattggcgttgactgcactctactaccttgaaaacaaactttcaaattttatgaaaagttgttttaaaatttacgcagtgcttcacactttcgcaggctccccctgtctgttgacctcagccctctgcatgctggcgaatccgcttcgtcctacattaccacccgccggcgacaaagtcctgaccgcccaggcaataatgaataataaattaaaagcattctcatttattattaaactgccaatgcgtgttattcccattagcattttaaataaaacatttttaaatttactttttgcaaataattaaataacaaattatattggcagccaataacatctattatttaattccaggagtgcaacgatgctgaaaacggacatgattgacaaactgaatgaacagatgaatcttgaactctattcttctcttctttatcagcagatgagcgcctggtgcagttaccacagttttgaaggcgccgcggccttcctgcgtcgccatgctcaggaagagatgacccatatgcagcgcctgttcgactatctaaccgacaccggcagcctgccgcggatcaacgctatcgcctccccgtttgccgaatatgcctcactcgacgagctgttccgccagacctacgagcatgagcagctgatcacgcaaaaaataaatgaactggcgcacgcggccatgaccagccaggattacccgacctttaatttcctgcagtggtatgttgctgaacagcatgaagaagagaaattatttaaatcggtgatcgataaactgaccctcgctggaaaaagcggcgaaggtctgtactttatcgataaagagctggctaccctcgacgcgcagaattaatcccccgcgccgcgacagtccgtgtcgcggcccccttaatgtcggcagatcttattttctgcggtagtaaaaccttcctctctggcaataaatttgccttttttctctaaaaacgctaccagctctgcggcgcttagattctctgctgaacaggtgtgaaaccgcgcctcttcgccaaagcggcggcgaatggcggcctcaagcgaggcgaccgtccaggactcacccgaggcgagcatcatctgtaaaacttcatgaccatgaatagaagacataacccctcctgcaaaaagcgccagcttaggccagaccgtcaatccgcgccttgcgccagcgcaggctttcgccctcttattatgtaaacatttcattacacaacttgtaatcccgatttgacgaaagccgtaatatcccctactctgcgcggcataatttcttgttatttgctgtagggatagcgaaaagcgtgaaaaaccgcactctgggcagtattttaatcgtagctggcaccaccatcggtgcaggaatgttggcaatgccattggccgccgcaggcgtcggctttaccgtcacgttgggtttacttttcaccctgtgggcattgatgtgctataccgcccttttgctgctggaggtctaccagcatgtccctgccgatatggggctcggttctctggcggcgcgctatctgggccgttatgggcagtgggttaccggattctgcatgctgtttctgctgtacgccctcacggcagcctatatcagtggcgccggtgaattactcgcttccagcctcaaccagtggctggactggcagctaccgccggccgcaggcgtactgatcttcaccctcctcggcggggcggtagtgtgcgttggcaccgcgctggtggatctgttcaatcgcttcctgtttagcgccaaaatcgtcttcctggtgattatgctggccctgctgatgccgcacattcatcaggtgaacctgctgacgctgccggttgagcaaggcctggccctgtcggccattccggtgattttcacctcctttggttttcacggcagcgtcccgagcatcgtcagctatctggggggggatattcgcaaattgcgccgggtatttatcatcggcagctttattccgctggtggcctatattttctggcagctggcgacgctgggcagtatcgacgccccggcctttaccgccctgctggcaaataacgctggtctgaacggcctgctggaggcgatccgcgaagtggtggcgtcaccgcatgtggagctggccgttcacctgtttgccgaccttgcgctggcgacgtcattcctcggcgtctcgctcggcctgtttgattatctggcggatatgtttcagcgtaaaaacagcgtcggcgggcgtctgcagagcgggataatcaccttcctgccgccgctggcgttcgccctgttctatccccgcggtttcgtcatggccctcggctacgccggggtggcattagccgtgctggcgctgataatgccggccctgctggtcatgaagagtcgccgagagcatccgcaggctacctggcgggtcgccggcggcgcaccgacgctatggctggttctgctgtgcgggatcggcatcgtggctattcagttcagcatcgctgccgggttgttgcccgcggtgggataaaaaaggggcctgctggccccttgttcatttcgctaagcaacactgcttatactttttaccgctgccgcatgggcagggatcgttgcgtccgactttcgcttcatttcttattggctgcggggcctccaccgcctgcggattcgctatccagtactggtaaagcgccagcgccgccggcgtgatacgctcgatgctggcgataaattcatccgccgtcagattatccagcgcgctaaactgttcttcgctgccgtggagcgcgatagcgtccagctccggctggagttcagcgggcaacgtcgaccagtcgctcagcgccacgccgcgcagatagccaaagcaccactcctcgactatggtcagctcctgaccttccgcttcgcgggtgccgaacagcggttcgaactgatcgggataagactccagccgttcggcgatatcgctcatatgctgcagcgtcagattgacaaagcgatcgcgctcgcgatcgttggcccagcgcgggacattatccgccccgccccaaatcgccagcagccactgagcgggttcgatgtcggtcggcgcagagaggatcgccgtcagcaggccatccagttcagagacatccagaatggcgccttcggcggcgtatttcgccagagtgtcatccagccattccagttcgttttcgttcaaaggtccggtattcattcacaggctcgcatggtaaaaatcgggcctacagtagccgaattgccgacagaaagccacccggcgatacctattgcgccggtgtcaacgatacgcgatcaggccaggccgcgcagcgccgacgccacctcacgacaggcctcctcccctaacgaaagcaaaggacggggaagcgagtctggatcgcagagtccgagcaccgctgcggcgctggctatcactcgcaggctaccaccatagcgatcaaagcatcgccataggggggccagctgctcattcagtgccgcagtctgcgccacatcgccgctacgtatcgctcttaccagcgccagtgagcagcggggaaagagtccgccgcagaccgaataccaggcttcgcagccggcctgcaacccggcagtggcccatgcatcgccgctgacgccaagcgtaacgcgagagggaagatgctgacgcagggccgctacacgttcgctagcctgtggcgcgggcaggccgggaattttaatcgaggcaatggccggcaaggcggcgatgcgcccctgcagctcatccgccagcattacgtgggtagtgcggggattgtcatacaggcaaaccggcaccgagacatgccgacagacttcttcgtaaaaggcaaagatctcctccgcggaaagcggctgataggacatcatcggcagtaataacgcatccgcccctgcctcctgagcatcctccaccaggcgtagcacctcgttagtcgcaatggcgccgacgccgaccatcatcgggatcgaccccgcatgcgccttcgccacctgtaccactcttctgcgctgctcacggctgagataagcgtagctgccggttgaacctaaaatgcccagagagtcgactccggcatcggtaagacgggcgagaatacgaataaacgctttttcatcaaaatcttgctgatgcaaaggtgtcaaaggaaatgcgcaaagtccactgaacatgctgcctccggtaggctgggctgagagtccgtttgatagtagcaaggcgcgatcgttttgtcctgggacaaatgagaaattgactgtaaggcaagagttaaccgaaaaacgccgtggcgtcaggctggcgggaaaggtatcagaaagtgaaagtacagaaacaaaaaaaccacccgtaggtggtttcacgacactgcttattgctttgattattctgtatttcccaatggtacccggagcgggacttgaacccgcacagcgcgaacgccgagggattttaaatcccttgtgtctaccgattccaccatccgggctcgggatataaagtggaggcgcgttccggagtcgaaccggactagacggatttgcaatccgctacataaccgctttgctaacgcgcctttaatactgaagcacccgcaactgccgatgctgttaatctggagcgggaaacgagactcgaactcgcgaccccgaccttggcaaggtcgtgctctaccaactgagctattcccgcatcatcaagttatttgctaatcacttgattttgttatcgtctggaagactgtgccgccgttcgatgcgttgcattctacttatctctcgcggtgagtcaacggtatttttcgcaactttgtatcgtttgctgaaaataacggcgaaacgatcactgttcaagcaaatcgccgcgcgccgcgttcaaatactgcagcatcgaccacagcgtcagcaccgccgccacgaggaaaagcgcgatcccggcccactccacccacggataaggacgccacagcatccataccagggcggtcatctgggcggtcgttttcactttgccaatccatgagaccgccacgctgctgcgtttccccagctccgccatccactcacgcagcgcggagataatgatctcacgggcaatcatggtcgccgccggtagcgtgacccaccaggtgtgatagtgttcggcaaccagcaccatggcgatagccaccatgactttatcggcaaccgggtcgaggaaggcgccaaaacgggtgctctgattccagcgacgagcgaggaaaccatcaaaccagtcggttaccgcggcaacaaagaagatcagcgcgcaggcaaacggcgcccagctaaagggcagataaaacgccagcacaaaaaacgggatcaggatgacgcgaaacagagtaagcaacgtagggatattaaattgcatagtgacgggtaactatctgttgtaagtaaaaattagccctatgttgctacagagcccctaatgtttcaacgagtagaagatcttttctgccagagcgtgagagatgcccggtactttagcaatttcttcgacgctggcctgctgtagcccctgcagcccacccatatacttcagcagcatctgacgacgcttcggccccaccccctcgatagtctcaagcgagctggtgctcttcactttcgcccgttttttgcgatgcccggagatcgcatgatcgtgcgattcatcgcgaatatgctggatcacatgcagggccggcgaatccggcggcaggctaaaaccttccccttccggctcaaagaataacgtttccagacccgcttttcgatcgctacctttcgccacgcccagcagcagcggatgatgtttatcccaggggacgtccagttcagcaaacacggctttcgcctgggccagctgtcccttgccgccgtctatcaggatcacatccgggatcttgttgtcatcaatcgctttaccatagcgacggcgcaggacctgattcatcgccgcatagtcatcgccaggggtaatgccggtgatgttgtagcgccgatactccgcgcgcagtgggccattgccgtcaaacaccacacaggatgctacggtctgttcgcccatggtgtggctgatgtcaaaacactccattcgcttgacggccggcagctccagtacgctggccagcgcctgcaaacgctgatgaatggtcgattgctgagacaatttggtcgttaacgctgtcgcggcgttggtccgcgccagcttaagataacgcgctctgtcgccgcgcggcttagtctgcacattgattcgacgacccgccagctccgacagcgagtcggccagcagcgtcttatccccaaggttaaagtcgagcaaaatctcccccggcagcgtgcgcatttggctgccctgcaggtagaactggccgacaaaggtctccacgacctctcccagctcggtgccgcccggcactttcgggaagtagcttcggctgcccagcactttgccctgacggataaacagcacatgcacgcaggccatgccggcatcgaaggcgacgccgatcacgtcgaggtcgtcaccggtgttggagacaaactgtttctccgtcacgcggcggacggcctgaatctggtcgcggatgcgcgcggcctcttcgaactccaggttctggctcgccttctccatccgcgcgatgagctgggtcagcacctggtcatccttgccggcgagaaacagccgcacatactctacctgctgagcatactcttcttcgctgaccagcccggccacgcacggccccaggcagcgaccaatctgatactgcagacaggggcgggagcgattgcggtagacgctgttttcacactgacggatgggaaagattttctgcagcagcgccagggtctcgcgcacggcatagccgttgggaaaaggaccaaaatattcgcccttcgcatgtttggcgccgcgatgcatcgccagacgcggatgagtatcgccgctgagaaaaataaaaggatacgatttatcgtcgcgtaacagcacgttgtaacgtggctggtacagcttaatatagttgtgctcaagcagcagcgcttccgtctcggtgtgggtgacggtcacgtcgatttgcgcgatcagcgctaccagcgcttccgttttacgcgacgcaaggttgctgcggaagtagctactgagccgctttttcagatctttggctttgccaacatagatgacggttccgccagcatcatacatccgatacacaccgggctggctggtcaccgttttcaggaaagcttttgcgtcaaaaacatcactcactggcttgctaacgactccgcattacacaggccatggcgaattgccaggtgggtcagctcgacatcgccatgaatgtttaatttactgaacatccgatagcggtagctgttaaccgttttaggactcagatttagctgctctgagatctcattcaccttctgacctttggtgatcatcagcataatctgcaattcgcgttcagacaaactggcaaacggcgattctgtcttttcgggttcaatctgacttaacgccatttgctgggcaatatcggaggcaatatagcgctgcccggacgcgacgcagcggatggcattcaccacttcctgcggcgcggcgcctttactgagatagcccgccgcgcccgcctgcatgaccttggcaggtaaaggattctcggtatgcacggtcaacatgatcactttggtgcccgccacggagcgcgcgattttgcgcgtcgcttcaagaccaccgatcccaggcatgttcatgtccatcaggacgacatctgcggaattagcccggcaccacttgacggcgtcctcgccgcagcaggcttcgccagcgactttaatcccttttatatcttccagaatgcgtcgtatccctgcgcgcaccagttcgtggtcatcaacaagaagaacgttgatcaaaggaataatctccagaatgagggataacgctactgatactttatctcccacatattaccgggttttattgctattttaaaaggcaaaaaaatgccctcgcctcgatttggctctcatttatggcaatgtctgtgcacactaagtggaaagtcattgagaacagtcagttgcccggctcttattttttaacaatactcatacagaaggcacaaaaaatacaacagattacgtagcgcataaatacgaagcaaaatatgtaacaattattaacgagctaaatagatgggggaaattattggcttgccgacggctattacgtattatccgaagcatcaaaacattcacagctcagatgagagaacagaaattaagcacaccttttttttctgtcgcttgtggtatactgcgcggccttcacattgactagagcgcaatagcgcagcgagtaaacgaggatatcgatgagcacaccagatttttccactgcagaaaacacaccagatttttccactgcagaaaataagcaggaactggcgcaggaagtctcctgcctgaaagcgatgattacgctgatgctgcaggcgatgggccaggcggatgcggggcgcgtgattattaaaatggaaaagcagatttcacagatggaagatgaggctcaggccgccgtattctccagcaccgttaagcagattaaacaagcctatcggcagtaatcctgtgccggctgaaagtatcactgacagccggtatcacgtctgacacgcagaacggcaggcgcattcagattagccctgtcgccacggcgtagcaggcaatttgcgttttattcggcgcattaaatttccgctgcatattcttctgatggaaattcaccgtattttccgaaatcgagagaatcatcgccacctccgccgaagtctttccttccgccgtccatttgaggatttccagttcgcggcggctgaacttcatctccggcggcatcaccatctcatcttccagacgcagcagcgttagcaagcttagttcagtcagcgttcgcagacgcagctcaagctcatcttcagggtaaccgcccggcagacgattgttcgcggagacagagagaaatccctgagcatggtttggcaacgtcaggcactgcgtcacgcccttttgcagaccatggtcacgcgccccgtcccacagtgccggcgcatcacgaaacaggctgtcgttccatggcagatggccacgcataaaattctccggccgtaacacaggatctatcgcgaaataattttctgcctgatagtgcgacatccatgcgcgggggtaagtcgactggaacgtaacgcgggggcgggtgaaaggcaccgggtggcgcacacaaagcgtgtagtaatcatattccagcgcttcggtttcacgttgcaggagattataaacctcctcgccggtggccatggactgaaattggtgcagcatatcccgccgccagctgaaaaaatcattgtccctcatagctgtgcaaataactcctgattgataatcattattataaatacagaaaactaacacataaatcttatttatatgtataaaatatcgtagctgtcgcatttattagtctgaaggcttgccattttcccgctcgccgcacagaaacatagcgtttttctcccatcatgttctacaccctgccaagggcgatgggaagcggtgtatacggccgtgggagtcaatagcgcaaagacgtgtcgcgggggcgttaccccgccgcgagagtgggctaaacgcggcggctcccgcgaagctgagccgccgcgctagcacaagctttactgcatcaggaatttttcaaggaactgacgggtacgcggctgctggggcgaagcgaacaacgcttttgcctcgccttgttcgacaatgcgtccctgatccataaatatcgcccgatcggctacgtcgcgggcgaaactcatttcatgggtcacgatcaccatggtgcgtttttcctgcgccagctgacggatggtgttgagcacctcccccaccaactcaggatcgagggccgaggtgggttcatcaaacaggatcacgtccggacgcatagccagcgcgcgggcaatagccactcgctgctgctgcccgccggagagacggcgcggatagctattctcttttccgctgagccccaccttcgccagcagttcgcgcgcccgcgccatggactcctgcttatcttcaccttttacgatgaccggcccttcaataatgttctccagcaccgtacggtggggaaacagattaaagttctggaagacaaagccgacgtgctggcgcagctggcgaatgagccctttctgcggcccgaggctgcgaccggcgtcgatcgtcacatcgccgacgcggatagtgccgctctccggttgctccagcaggttgatgctacgcagcagggtggttttgcccgagccgctggggccgatgatcgccaccacttcccctttctgtacctccaggtcgataccatggagcaccgtctggccatggaatttttttaccaggcttttcacttctatcgcactcatttcggatcacgctcctggcggttcagctggttttcaaaataattctgcagcgaggagagcactgtcgccattacccagtagatcagggaggccgccagatacatggtgaagacctccagggttcgcgaggtgattagctgcgcctgacgaaacagctccggcacctggatcgttgccgccagcgaggtatcttttaccaggctgataaaactgttcgacagcggcggcaaagcgacccgcgccgcctggggtaaaatggcccgacgcatcgtctgccagggcgtcataccgatactggccgccgcttcccattgccctttatcaatcgaggcgatggccgcgcgcagcgtttccgccgcataggccgcagtattcaacgacaggccgatcatcgccgccgggatcgggtcaagctcaatgccgaactgcggcaagccgtagtagatcataaacagctgggcgataagcggcgtgccgcggaaaatggagatatacatgcgcgccagccattttaccggccagactggcgacatgcgcatcagcgccaggataaagcccagcaccaggccgaaaaacatcccgccaatgctcagctgcagcgtaaagacggcccctttcagcagaaaaggggcagaatcaatgaccagttggatactttcttgcatgctgtcgtttctgtattagaggtgaggatgataggcaaacagcgccggcgctccgccggtgtggacgaacagtatcggcccttcatccttaaagcgcttctgcgtgatgccgtcgataagcccggccatcgctttgccggtatagaccgggtcgagcaaaataccttccagctgcgccagcagcttcacggcggccatcccatcttcgtttggcgtaccgtatcctggggcaaagtagtcatcccacagtataatttcagccttcgcctgtagctcgagactgttggccacggcctgctgcagcgcctccactttcggcaactggtcagcgaccgagcgcgacacggtcaccccaatcagttccgcctgcggcatcagctgttcaaggccgaccgccaatccggcatgggtgccggcgctgccggaggcgaccacgactgacgagatcgccaccgcgtcttcgcactgctggctgatttccagtgcgctttccacatagcctaacgcgccgagggcattggagccgccgaccggaataacatacggacgatacccctgcgcctcaatgcgggtcgccagctcatcgagctgggcggcgggatcggtcagggcatcacacatctcaacctgggtgttaaagagatccagcagcagacggttgccattgctcagatagttctccgcccgggtgccgatgggattttccagtagcgccacgcaatgcagtcccagtttcgcagcgactgccgccgtctgacgcacatggttagactggatcgcgccggcggtgattaaggtatccgcgccctcgcgcagcgcatcggcggcgagaaactccagcttacgcagtttgttgccccccatcgccagcggcgtcgtatcatcacgtttaataaaaatttcgcgcccaaggtgatcggacagacgcgggagatactccagcggcgtcggcgcgccgatcaattccaggcgcggaaagcgggttaagttttgcagtgacatggcccctcctgactcagttatgcttcattatgcacacagttacgcgctaaataaaaaaaggcgcttccaggagcgccttttttcaccgctgtccgttatttcgtcacgtcagcgccaaaccatttctcggacagcgccttcaggctgccatctttctgcatgtctgcaatcgcgccatctaccgctttcagcaggtcgtcgttgcctttacgcagcgcaacgccagcttcctgacgagagaaggcttcgccggttaccgccagcgtattgttggttttcttcaccagatccaacgccgccagacggtctaccagaatggcgtcaatacggcctacacgcagatcctggtatttggtgggatcgtcatcataggtacggacatccacgccctggacattctgacgcagccactcttcatagttagtgcccagtccgacgcccactttcttgcctttcagatccgccgcggttttaatcgcgccttcgttacccttcttcaccagcgcctgcacgccggagacggtatatggggtggagaaatcgtatttcttcttacgttcgtcagagatagtgacctggttaatcaccacgtcgatacgcttggagtccagcgaggccagcataccgtcccatttggtcggtttgagatcggccttcacgccaagatgtttcgccagttcgttagcgaattccacttcaaacccggtcagcttgccgtcatccccctggaaactaaagggagggtaggtgccttcgaggcccacgcgtagggtgccgcgctctttaatctgattgagcaggttttccgccgcaaaagttttcacgctgacgccagccatcaaaacaacggccatcgcgcccatcatcgcctgacgacccagaagtgctaatttcatagataccccgaaggttaggattttcctgtagtgtaaggcgcttaacgccctgacaccaacatcgttacgctacatcttatgcaaatttattatatatgatccgctttagggtatagcgaaaatcagggctttcctcaccctttttgctggatatctcccatactgcaaaggtcagcctgttgacgtctggagcatggaagatgaaaaaccccaccttattgcaatgttttcactggtactaccccaccggcggcgagctgtggcctgaggtcgaagcgctggcgcccagcctgaatgaaatcggcatcaatatggtctggttgccacccgcctacaaaggcgcctcgggcggttactccgtcggctatgatacctacgatctctttgacctcggcgagtttgatcaaaaagggtctgtcgccaccaaatatggcgacaaagcgcagttgctggcggcgatcaacgccctgaaggagcacaatatcgccgtgctgctggatgtggtggtaaaccataaaatgggcgctgatgaaaaagagtctctgcgcgttcagcgcgtcgatgagcaggatcgtacgcaaattgacgaggagatcattgagtgcgaggcatggacgcgctacaccttcccggtgcgcgccggacagtattcgcagtttgtctgggactacaaatgttttagcggcattgaccacatcgagaacccgacggaagacggtgtgtttaaaatcgtcaacgattacaccggcgaaggctggaatgaacaggtcgatgatgagctcggcaactttgactatctgatgggcgccaatatcgatttccgcaatcatgcagtgaccgaggagatcaaatactgggcgcgctgggtaatggagcagaccggctgcgacggttttcgtcttgacgcggtcaagcatatccccgcctggttttataaagcgtggatcgagcatgttcaggaggtggccccgcagccgctgtttattgtagcggaatactggtcccatgaagtggagaagctccagcagtatatcgacctggtcgagggcaaaacgatgctgtttgatgccccactgcagatgaaatttcatgaagcgtcgcgccagggccgcgattatgacatgagccagattttcagcgggacgctggtggaagccgaccctttccatgccgtcactctggtcaccaatcatgatacgcagccgctgcaggccctcgaggcgccggttgaaccctggttcaagcccctcgcctatgcgctgatcctgctgcgggagaatggcgtgccctcggtcttttatgccgatctcttcggcgcttcctatgaggataccggcggcgacggagagacctatgccattgagatgcccgttatcgaacaactccacgagctgatcgacgcccgtcagcgttttgcccatggcgtgcaaaccctttggttcgatcatcctaactgcatcgcctttagtcgtagcggtactgacgacgatccaggctgcgtggtgatcatgtccaatggcgatgagggcgaaaagacgctgacgctgggcgaaaactatggcaacaaacgctggcgggattttctcggtaaccgggaagagattgtcgaaaccgatggcgaaggctgcgcgacctttacatgtaacggggggagcgtgagcgtgtgggtgttagaggaggtattgtagtcctctgacgccgggcgggccagctatggcccgccaaaatctcagcgcgtggaggccggcgcgctgacgggccccgtcgctcgcgctttggcccacgccttctcgcactccggagtgagacgttcaacacgggacaacgtcatccgatcgtaggagatcgtgttgccctcgcgctcgacaggatagatgtccagggaagcggtcacgttgtagatctcactgtcacgattcatcagtttccccggctgcgcaatcacgcgctgccactggcggcagtcgaaggtgtccccttctttggtgacaatcaggctggcaatggcgtcaggactcatcatcgcgctctgcggccctttcgtttgccagaaacctgcaaggccagccggcgccggcgctttaacgacgtcctcataacgatcaacctgtacgcaaccggccagcgccaccaccatgccagcaaaaaataactttttcatcattcatcccacaagccgataaaaaagtattgtggcattaaagcgttaagccttccacccccaccgcaaagggataagcgagcaagccagcaaccgctaacgtgggtttcatttgaagtaaggaaattctgaaagtaaaagaatactgggcgcgtaaccatagcatctatgggcactttttgtttttaattcggtcacactaccggttcttgactttactttaagagttttcctggcaaattatatgcatagatgcggaatagtttaatggagctaatgggttctttctaaacctactattattatcgcccgcaaggactgcttcgcacagccagtgcgaagtgtatatcgttacgtgttgattgaggatgggtcatgtcaacgatgattatggatttgtgcagctatacccggttgggattgacgggatatctgaccagtcggggaattaaaaaacaggaaatcgttgaggtcaacagtgctgcggatctgcagaaacactgtacgtcgtgttgcccggcggtggtgtttctgaatgaagactgtttcgtgcatgatgatgaaagtaatggcattattcgccagatcattacgcaaaacccggcgacgctgtttgttatctttatgtcgctggcgaacatccattttgaccgctatttgcgggtacggaagaatctgctaatcagttcaaaatcgataaccccaaaagaccttgatgttattctggttaattatcttaaatacaaaaacaccagtgtagggcagttaactttaccgacattgtcactgagtaaaacagaatcaaatatgctgcaaatgtggatggccgggcatggtacttcgcaaatctcaacgcaaatgaacatcaaagcgaagacggtatcgtcgcataaaggcaatattaaaaagaaaatacaaacgcataataagcaggtgatttatcatatcgttcggctgaccgaaaacatcacctccggtattcaggtaaatatgcgctgaaacaaactggcggcgctcccgccagttcagttttacgagacctctttttccacgaaaatcccatccgggtggcctatttcattaaaaaaccagatccccagaggatagtcttccagtgaaaccagatacatcgttccttcactaaacgactcaatcgccagcactacccccgatcgacgtgggccaccgtcggtcttcaccgtgacacgatcgttcacctgcataatcatctcctctatattttcagccagtgtagaacaaaaccacgcaactcgcagcgtcgcggcacgtgactggcgcttttttagaccggctatacttagagaggcttgagcaacgctcagcgagggggtaatgatgaagcaccaattaacaggccagaccggggacgaccttgacgtcaacgtagatgccctgctggcggcgataaatgagatcagcgaaagcgaagtccatcgcacgctggacgacccgcagcgcgccagcatcgatggccgcgggtcacatacctggcgtgagctggcggaggcattcgaactcgatattcacgatttcagcgccagtgaagccaaccgttagcggcaggcgaaaaaaatcccgactcgcaggagtcgggatcaaacttgctaatgcaagaagcacttgaaaattcgttacaccgggaaatccgatgcgttgaaacattatcctcaattattttgcatgacaagagatattcatgacgcaaaatattgagaatgttggcgcctggtgacttatcgggctgcaaggctgatgtgagaaggcttagctgcaaaccggtttcattcgatagcgcgaacgcctgcgatcactttaagataattctcattttgccaatcggcatcgaaacgttttactcacgctgcgctgcgaaaacagacctggttacgcccattttgcttggccagatagagtcgcccatcggccaccgactgcagcgcttcaaactgatactccccccgctcttcgctggcgctcacccctaacgaggcgctaacccgcagcgtcacgttgttatgcaaaaagacttcccgtccctggatacgctggcgcaatcgctccgccaccgccgccgcttcctgcagggtggtattcggcatcacgatacaaaactcttctccgcccactctgcccagcagatcgccctgccgaaccgcgctggacagcgtactggccaccatcgacagcaccctgtcccccgcctgatgaccatagcgatcgttgatgtgcttaaaatgatccagatcgagctggatcaccgccagcggccgtccgctgcgctggcagtcgctggctaccgccatcgcctgttcaaacagcgccccgcgattgagcaggcgggtcaaggcatcatgccatgcctgccactccagagaggtttgcagaacgctcatgttgcggaccatgcggcggatcaccagccaggagagcaacagcatcaaggtgaagaggacccacatcagggtcagggcgatggtgatggtgccaaagttcccgcggacgccttcccgcagagtgtggatccgcagcagcacgccgtcaaaattgcgcagtttggcccagctgatatagcgcgtcagcagacgcagccctccctggttatcatggacaaacgcgcggctcagcagctcctgctcgcgcggcgacagcagggtcaggacattccccggcgtggaagaagccagcaggttcaaatggctatcataaagttggtactctccctcttgtcccccctgcatggcgctaaccaaaaacgctttgatttcactgactgagaaatccatcgccagcacgccgcgccagtaaccggcaaaatccaacggtatcgaagcggtgaccacctgctcttccagctgcgggtcatcgtcaggaaaggtttgccagataacgcctcgccccggattatttcgctgggtctggcgggtaaaccacggagcgccgagggcttgggaatagtgcgttatcacctgcgactcatcccgcagcggcagggtcgaggtaaaaaagccgctacgagagatatactgcatccgctcggcgaaatcgcgatcgtgctgcgtcagatttagcagatagcccagctcgagcgtcgccattagttcatcagccgccagcggatcgtccaccagcaggatagggttgtggccagcgacgctgcctgagatgccaaacaccggcagcgtacgccgattcggtagcgccacccgccaggcctgctgatggcgctggctcagatagcgttggctggccttacgcaatacatcgatatcaagcggctgttcgagcgccgcctgcatcccatggcgaaaaaacatcattctgtcgatgttgaactgcaacagcccatccatttcatgagcgacgttagccagattgttacgctggttggccacgtaggcctcttccaggacattgatttcacgccagatcagcagcgtggagaaaaacagcactgcgataaaacaagcgttaaccacatgcgccgggcgagccaggtggtagcacttttttaacttcaaccgcagtggcttatccatctttctctcgcagtacgttgcgcaaacctcgcggcgtcagcgccccggtctctgtcgatacccggggcgttttcagggtagaacacgcggcgccgttacgctgcgtttcgccatgctactttccagcgccacgcaggctgctcaccgccttaacgcccgccagcaccaccgcgccgatgataaaacccagcaccaggttggcgacgaccggcagcgtggaggccatcaccccacccaaccccgcgctccagtgctcgatggcatgatgcagcggcgcaataccgtgaacgactatccccccgccgacgaggaacatggccagcgtcccgacaatggacaacaccttcatcaggcggggagcgacggccaggagccctttacccagccactgcgccagcgcactacgtttttccgccagccagtaacccatgtcgtccagcttgacgatcacccccaccaggccatacaccccgatagtgaccagaatcgcaatccccgaaagaataaggatttggttaagcagcggagcttccgccacgatgccgagggtaatggcgacaatttccgcggacaaaataaaatcggtgcgaatcgcgccttttactttgtcacgctcaaaggccagcggatcgcgctccgccagcgcggcgagacgctgctgccgccgttcaggatcctctttgtgtttccgcgcttccagactgtgcagtaccttctccatcccttcgaaacagagaaacgcgccgcccagcatcaacaatggcgtaatcgcccaggggatgaaggcgctgatcaacaaagccagtggcacgaggatcactttgttaacgaacgaccctttcgccactccccagaccacgggcaactcgcgattcgcccgcacgccggtaacctgttgggcattgagagacaaatcgtcgcccagcactcccgccgtttttttcgccgctaccttgcccatcacggaaatatcgtccagcagcgtggcgatatcatcaagtaatgttaaaagactacttcctgccaaaatgattttccttctcttttcatcaatgtctccctcgagtatgcgttaaaaaacggccggtgcccaaggtacaattagtcaatataaatttaacaacctgacgcaaattaaccactcgccagcacgatagttttcacgtttactatatgtcccctttctatctctgcaccgtcgtgaggaagtatgtctacccgtcagcttttaccgctcatcggggcgctgtttgcgctgtatatcatctggggctctacctatttcgctatcgccgtcggggtcgccagctggccgccgctaatgatggccggcattcgttttctcgctgccggcgtgctgttgctggggtggctactggccaccggccataagctaccggcgcgtcgtccgctgcttaacgctgcgctgatcggcgtgttgctgcttgcggttggcaacggcttcgtgacgctggctgaacatcagcacgtcccctccggcatcgcggcggtgatggtcgccaccgtaccgctgttcaccttatgcttcagccgctttttcggcatcgccacccgtaaactggagtggctgggcattgccattggccttgcgggtatcgtgatgctcaacagcggaggcaacctgaacggcaacccctggggcgcactgctgatcctgattggttccctaagctgggccttcggctcggtttacggttcgcgaatcgtactgccgatcggcatgatggcgggggcaatcgagatgctcgccgccgggatcgtcctgctggcggcctcatggctgagcggtgaaaccttaacccgcgtcccttcctggtccgggatcgccgccctggcctatctggccatctttggctcgctgatcgccattaacgcctacatgtttttaatccgcaatgtcaccccggcggtcgccaccagctacgcctatgttaatccggtggtcgcggtgctcctcggtactgggttcggcggcgagagcctgtcgctcattgagtggctggcgctggcggtgattattttcgccgtagtgctggtgacgctggggaaatatctcttccccgtccgcagcgaggctaatccttgtaaggcgtcgaagtagtcgtcagttcgcggatcccctgcgtatcgatctgcgcgtcgtgtccggcgccgcagatccactcttccagacgctcggtgagcgccgcatcactcagcctaaggcgcccgcgcagggcgcattcccagatgataagcacccgccagccctgctcagccagctgttgccggtcgcgggcgtcgcgcgccacgttaccggcgattttgtccagccagaatgccgtgcgggtggccggcaccttaaacagatagcagtcatggtgatgccagaagcagccgtgagtaaagataacgcaacggtagtcgggtaaagtgaaatcgggacgtcccggcagcgcgcgatcctgggcgacaaaggtgaatcccgccccggtcagcagcgccgctatccgcttttcgatcgccgtatcgcgcgtggcgatcgcccgcatatttttactgcgcgtcgctttatcgtgaacatccgccatcattatcatccgcttcgcggcgcgccaccgcctgagcgatgcgcggcgccaggagtttcgccaccgcggcgaagaccggaaccaccaccgagttgccaaactgacgataggcctgcgtatccgataccgggatgcgaaaacgcgccccctgcggggattcaaagcccatcagccgggcgcattcgcgcggcgtcaaccggcgaggccgccgctgttgattcagcggatcgtcaaaatgcttctcaccgagcggccggtcccagccgcgatcgacgagaatttcggcaccatctttatagtagcgggcagaaagcgtccgggccacgctgtggggattggcggggtcaaccaggccataaccaaagccattaccccgcgcctgatgcttgcgggcataacgataaagatatttccacagcaccggcgtaagaataaatttcgcatcgaccgtcggctccagtagctcgccaaatgttggccgcaccgccgggtactgcgccgcgatgtcgcgcagcgtaaatccagcatgcagctgcagatcgcgacggaaacccaccagcacgatgcgctcccggtgttgaggcaagaaatggcgcccgtcaatcaccttcgggtcatccggcccggtatgccccgcgtcagctacttcatatcccagctcatccagcgtctgcatgatgatacggaaggtgcgcccctgatcgtggcttttgaggtttttgacattctccagcacaaaaatcgctggctgacgagccgcgataattctcaccacgtcaaaaaacagcgttccctgggtttcgcaggcaaagccatgcgcacggcccatcgcatttttcttagagacgccggcaagcgagaaaggctggcaggggaagccagccagcagcacatcatgctgagggatagattcgcgaatatgccgcgccgcctcctcgtcgctaacgtcagagcgttggctgagggtaatatcgcggatatcttcattaaaacggtgctgctgcggatcacagtaccagttggccttataggtgcgtaccgcgtgcttgttccactcgctggtgaaaacgcactgtccgccgatggcttcaaaaccactgcggatcccgccaataccggcaaacagatcgataaaacggaacccatagtgcggatgatgggccggcggcgaaggcaggagcgtcgccagatgagcaacttcctgcgggcgcaaacgctccgccgcgcggccaagcgccgccacgcgcttgaggatcgccgcgctccagtgctgttcgccgacgctcaccagttcggcaaccagcgtttttacatcgtagatcgtcatcagctgacgcagcagcgcctcagcgtgttccccggcctgttcagccaacgacaacgacctgtgttccttgcttaacttttgcggcatatcctcaaccaacgcggacgattttggcagagagtaccataaatcaccggtcggttgacgcctgcggtgcaaagcggcgcaaaaccgcttcatccagcgccagcggcttcccctgcagctccgcgctgagcttagccataaattcgacgagaaaacgggcattatgctgcgccatcgctttccccttgtcagtttgcatggtttccggcaggcgcagaagtttgcactggaaatggtcgagggcatatttgcggtcatccagcgcccgccgatcagcaaaaggatcttcggcatcaaacaagatggtattcagagcgccggcgacagcgaagaccctcgccagaccaatggctcccagcgactcgagtcgatcggcatcctgaactattttcgcctccagcgtgcgcggtgggatcgccgcgctgaagctgtgcgcctcgatggcatggctgaccgccgggtaacgatccgcaggaaaatcagcaaaggccgactgcagaatggcgagggttttctcggcggccatcatcgaggatcgacttcgctccggatgattttttggcaagctgacgatgtcatgaaaatagcaggccgtgaggagtaccagccggtcgacttcctcccccgcggccagctgagtggcggtcgcccagacgcgacgaaaatgggacagatcgtgtgcggcgtcatcctgcgcatggtgcgtcagtatccagcgctcaaatcgttgctgccagtcaaccaggtccataggctttcctttatctgagggtcagcctcgagcatagcaattttagcgctgatgatcctgctcgccgcgggatggacgcgtataccagacgaccgcgccgagaatagagccaatgccgccgaggaccagcatgcccaacagggcgccaagccatttcccggccgttgttccaaaatcaccctccacgctggcgccgggaacgctgtgaatttttcccactacccaccagtaacgcacaatgacccagacacaatatccgcaaaaagcatacaacgcccagagcgcaagtttccctcccgggctgcgttttgcctgctcttccatctcattcctctccgtgacacaacagactattgtcactcaaaacgtgatacgcatcacattataccgctaacctgcgtcacaggcagcagtttcatcttcgtcttctgcgccttctcgcgacttatgctgccaatgcgcacaggctgaagagatgtccttattatctcccgtacgcttaaagctattcattccttaattatcgcaagctgggttgataattccctggatatttacattcacacaaaataaatttccataatgaataatgagcttgattgttatttgtgcaatttatttcataaaattaacaacaaccaaccaaagacataataaagcattgctatataagaaaataatggattttacacaagcatcaaaatttaatataaagaaccacttagaaatattttgaaatgtttaacattatttatttacatattttattttaaataaagatgaacttagtcgttagtatcggatagtcattccggagggattgtcataattcatagaaattattattaaaagggaatatataatgaaaagaaaagtactggcactcatggttccggcattattaatggctagcgccgctaatgccgccgaaatctataacaaaaacggtaataaactggacctctacgggaaagttgacggcctgcattacttctctgacgacgcttcagaggacggcgaccagacctatgttcgctttggtctgaaaggcgaaacgcagattacttccgagttaaccggctacggtcagtgggaatacaacattcaggcgaacaccagcgaaaaagaaggcgcgaattcctggacccgtctcggctttgccggcctgaagtttgccgactgcgggtcgctggactatggccgtaactacggcgtggtctacgacattgaatcctggaccgatatgctgccggaattcggcggcgatacctacacccagaccgacgtttacatgaccggtcgtactaacggcgtggccacctaccgtaacagcgatttcttcggcctcgtcgacggcctgcatttcgccctgcagtatcagggtaataatgaaaacgccggttctggcgaaggcactaataacggtgggaaacgtaagctggcgcgggaaaatggcgacggttttggtatctccagctactacgatctcgatatgggcatcagcttcggggcagcgtattcgtcttctgaccgtacccataaccagctggcggccgcgcgtagcagccagcgttatgccaacggcgataaagccgatgcctggaccgtcggcgcgaaatatgacgccaataacatctatctggccgccatgtatgctgagacccgcaacatgaccttctatggcaacgatagttttggcggaattgccaacaaaacgcagaacttcgaagtggtcgcgcagtatcagttcgacgactttaatttaccgctgcgtccgtcggtggcctatctgcagtcgaagggtaaagatctctacgcctattctcgctacggcgacaaggatctggtcaagtatgtcgacgtgggcatgacctactacttcaacaaaaatatgtccacctatgtggattataaaatcaacctgctggatgaagacgaccgcttctacaaaaacagcggtatcgcgaccgatgatatcgtcgccctcggcctggtctatcagttctgatccccgtcaaagcccgcgttcagcgggcttttttatgttcccgctccgttgagatcactcttttcgacattgccgctttccaggcgtaccttccctctttatgatgcgtttaagctcgttcgggctaaaagcggcgataaggtgccaaaaggataaagcgcgctaccgcgactctacgctgaaaccaggacgatgatgatggtgataccccagcgcaggcgttatacctgaagctaacggtgttattgaagggaaggttagagcaagaaaagtggcggagagagggggatttgaacccccggtagagttgcccctactccggttttcgagaccggtccgttcagccgctccggcatctctccgctgtgatggttgctataatgccaggatctttggcattttaatagctcccgtttcggtaattgtgttcaagtgacgactttgcgagcaatatgatgtttaaatggccctggaaagcagatgatgagtccggcaacgcagagatgccctgggagcaagcgcttgccattccggttttagcccatctttcgtccactgagcagcacaagctcacgcagatggctgcccgttttttacagcaaaagcggctggtggcattgcaggggctggagctgaccccgctgcatcaggcgcgcattgctatgctcttttgtctgccggtgcttgagctgggcattgagtggctggatggcttccatgaagtgctgatctaccctgcccctttcatcgtcgatgatgaatgggaggatgatattggtctggtccacaaccagcgggtggtacagtcgggacaaagctggcaacagggtcctgtagtgctgaactggctggatattcaagactcttttgatgcgtcaggctttaaccttgtggtgcatgaagtggcgcataagcttgatacgcggaacggcgaccgggccagcggcgtgccgcttatcccgttgcgtgaagttgccggctgggagcatgatctccacgccgcgatgaacaacattcaggatgagatagatctggtcggcgaaagcgccgccagtattgacgcctatgccgccaccgatcccgcagagtgctttgctgtcctctcggaatattttttcagtgcgcctgaactgttcgcgcctcgcttcccggccctgtggcagcgtttttgccacttttaccgccaggatccgctggcgcgtagacgtgagaatggcctgcaggacgaaggcgatcggcgcattgttcactaaaacaacgtgttgagctaaatttagccatttgaatcagcaggttaattttagtgttgacacaaaaatgcgaggccagtagtatgcgcctcgttcacacgattcctctgtagttcagtcggtagaacggcggactgttaatccgtatgtcactggttcgagtccagtcagaggagccaaatttaaaaatcccgctcagggaaacctgagcgggatttttgctttccgtgatcctctccgctccccaagcatgcaatcttatcctggtgtaggtgctattttcttgctatgaggcaagctgaacggccgtgagccccacgctcccgcaaaggcttaaataaaggcggtttaaccgtgccggaccatacctgggtgtaaggcgataatgcgcggttccaaaaaagattggcaacaccgccgcttctgatatctctccgccagcgggtataagcagcatcgtaccgtaggtaccgtccaaggttccgtatgtgatccccgcaggtgaaaatcagcgatgctgctcccaaccttatggctacagactttcgatccggcggtaaccgctgggtctgccgctgcgtagcagacatggaggatgctgaaaacagcctgtccagtgcggcgatgacgcccaggggacggctacgggtggatgtaccgagtccgctggcccgccttattctggtgccggcgctaccggctttccacgcccgctaccctgatatccagatcgacatgggtgtgagcgaccgggtagtggatctgatcggcgacaacgtggattgcgttctgcgcggaggtcaaatcaccgaccagtccctaatcgcacgccatgtcggcgatttgcaaatcggcgtctacgtcgcccccagctatgtggaacgccttggcgctcccgcacacccgcgcgagctgcaaaatactgaccattgcatagtgggattcttgtcctcacgcaccagtaagattgatcctttggtactgtgcagtgagaatgaacgtattgaaatcacgggcaactacgtacttgccgtggatgatggcaatgcttacctcgaagctgggttagttggcttaggcgtgattgcgctgcccaactatatggcggcagcgcatcaggccgttggcgctttgattccattatttacacaatggcggattagcccaatgcctctgtacctggcgtttccaccgaaccgccatgtcaacgccaagctgcgcgtttttattgactggatcgttgaagtgatgctgcagcatgtccccattgccaacaatcagtgacgccatcccctgattcgcttatcagcggcgatgggggtcattcccgttgttttgaacgaaagtgaataatagaaatcgttttcccaatttaaatatttataacgaatccaagaactataatgcggaattgccgtcctattcgggattcgctgtaaatatttccctaacactagcctgtttacctaattacagtattcatgggattaccgatgaggtacactttatctttaatatcgtcattcccgtatcattcattataatgataggaaattgcatttaataaaataaggatattaatttatgacaaaaggtataaaaattttcatcactgtagtcttcgtgattctggcattgttgagcggcatgatgagcttcatgatcgtcggaatgggggtcagcggtagtggctgtggtcaggagtgttttgataatatggattctgcaaaattcattagtattatattctggatattggctatcataagcggtatcttcgctttcatggacaatggcagccaaaaaaaa

SEQ ID NO: 5351 - DNA, 39442 bp, Unknown
  gut microbiota DNA sequence
ccatcaccgccactgttgataagttaaggatcggtttcccgatccttattcccaacaacgttgaatgcatcgtcagcaaaagagccttcttacaatagccgttaatcagactaaacgacccgctacaaacttccctgcgccgctgtggcgctgatattcaccggcatgccggagcggcgctgcagggtttgctcggcctgcgaaggactcactcccggcccctgagtaaactcgcgcagcgccgaggtcatcggcaaggggacttttctgtcggattcaaactccgcgcggttgcgcgacagcggctcgtgcacctccagccagtgactgccgtccggctccacgctgtacttcaccggctgatcgatcagctgaacccgcgtcccaaccggcacgttatcaaacaggaatttaatatcgtcattgcgcaggcggatgcatccctggctgacgcgcagcccgataccaaagttggcattggtgccgtggatggcgtagagcctgccgatgtagatcgcatacagccccatcggattatcgggcccggggggcaccatcgccggcagcgttttgccctctttcgcatactcgcggcgggtattggcggttggcacccaggtggggccttcctgcttacgctctactgccgtcacccagttacgcggcgtttcacgtcccgcctgaccaatgccgattggcagcacttcgacgctattgccctgcggcgggtaataatagagacgcatctcggcgacgttgatgacgatcccctcccgcacggtgtcaggcaggatcagctgttgcggaatagtcagcgtcgaaccggagcgtggcaaatagacatcgaccccggggttggcttccagcatattgcttaacccctggccgtactgggcggcaaaactttccagcggctgggtgttattctccggaacggcaatggtaaatgcgctgcctaccaaacggctcccctccggcggcagcggatagctgacagccagcgcgccgtggctggcaagcagcatcagcgccgtacagagtaatttcacacgccgcatcgtcattttcccttcctcagtcgcgactcacgtgtgtgaattatagcgttatttccactccccgacccgctggccagcatttccttaaatctgatagtcgattgcggcctcttccggctccatcgcctgacgcttaatctcatccagcgacagtccggcattgcacaattcgataaagcgccaaacgtaattccgctgcagctggccccgcttcagtcccaaccacacggtattggcatcgaacagatggcgggtatcaagacgcgtaaaggtgtccgcttcccgggcatcaccggactgctcggcgaccagcccgacgcccagccccagctccacgtaggtcttgatcacatcggaatcctgcgcgctcagcacgatatccggcatcaaccccttgcggttgaacgcctcatcaatgcgcgaacggccagtgatcccctggcggtaggtgattaacggccagcgggcgatcgcctccagcgtcaggggagaaacctgcgtcaaaggatgatccttcggcaccagcaggctgtgatgccagcggaaccaggggaaagccgccagcgtcggatcgttgctcaggcgctcgctggcgatgccgatatccgctccgccgttatgcagcagcgcttcgatttcctgcggggtaccctgcaccagctcgacgcgaacatctgagaacagctcgcggaaagctttaatgaccggcggcaggctgtagcgcgcctgagtatgggtggtggcgatagttaagacgcctgacgcatcgttagtgaagagatccgccagccgccgaacgttactggcttcattgaggatccgctcggcaatcgataacagcgctttacccggctcggtcatgcctaacaggcgtttaccgcggcggataaagatctcaatccccagctcctcttccagttcccggatatggcgactgacgcctgactgcgaggtatagagcatattcgcgacttccgtcaggttgtaatcctgacgggccgcctcacggataattttcagctgctggaagttcaccctttcctccgggccaatggacttaacgtatctgctattgttaaagtctgttgtcccaggtaacaaataataaaaaccagcaacttattccttaagagaatataccctaactgaccagctgcagttcacggttttccagcgatgggcggctcaccagagacagcaggatctctttcaccgcctgcgcctgcggcgacagactgccgcgagccgacatgttcagcgacagcgacaggctcattgaaggcgtgctgatccgcgccatccagccgttcgccgccccgcacagggaacgagcagcggattccggtaacaccgtcgcccccatgccgctggcgatggccgcggtcagggtggtgatggattcgatctcgccgataattttcgccgacagacgacgcagggtgaatgcctcggtgacccgcgcccgcactgcgctgtaatcgcgcggcaggaacaggttcatctccgccaccgccgtgagatccacgctctgccccgggcagtcgcgggtgccgaccaggtaaaggtcttctttcagcagcggctggctgacgatgcctgccaccggcgaacgctcatagagcaccgccatatccagctggcccgccagcagcttgtcattcagcgctgtgccgctgctctcctgcagatagaccatcacctcgggcaactcattgcgcaccgtttgcagcaacggcatggtaatggcggaggccgcggtgcccggcgccaggccgatcgacacctgaccacgcagcgtctggccgacgttattgaccgccagctgcgcctgctcgcactggcgcaggatagtgcgcgcatgggtgtagagaattttaccggcttccgttggcgtgacccctcgcttggtgcgtatcagcaactgctggtccatttcaccttccagggtcgcgacctgttggctgagggccggttgggcgatatgcaagacttcagcggcctgggtcagactgccgatatcgacgattttcacaaaatatttcagtcgtcttaagttcattttgcctcctgtaaggaacgccagcgtcaacgctgggagtatgatgcactggcttttgcaatttgcttgccagctttgcatttcctcggctgtcgcccgccgcaggcagtgttataagggatagtgatagcaattcggtttttatttgcccggtaagcagattgtggtatgccccattaggggtacattcgcactacaacggtgcaacatggtgaaaaaaacagcgcgtgggtggcgattgctgaaattgtcagcagtcgaacgcaattctttgaatcaggctttgacaaggccggatggcatcgttaatatgcgccccgttcacacgattcctctgtagttcagtcggtagaacggcggactgttaatccgtatgtcactggttcgagtccagtcagaggagccaaatttaaaaagcctgctttcgagcaggctttttgcttttcagcgccggtacttctgccggaaggcgaatggccaccctccggcgattgcggctttagcgtaaactctcttccttcagatctatctcccgcagcacctcataaaaagtgatatcgctgatgttatgggcgcggcgcagccggaacagctcctgacgctgggcgataatgacctctcgttgcatatatttctccagcctggcgcgcttagccagctccagcccgacatcctgcccctcgtcattgtcgttatagtgaagccgccgctgataggtttcgagcagcatattgccggcatcggcccgcagggcctgctcactgggatcctccaccggctcgtccagtagcgcgttaagacggttaatggccacctcggtcatcacggcgccaatgtcgtccttaccggtgtcatgcggtagatcatcggcaagataacgggtcataaacggcagaccgatagccgccaccaccagcgacatcaggatcactgccatcgatagaaagatcagtagttcacggcccgggaacggcgaaccatctgccagcaccaccggcagcgtcagaataccggcgagggtcacagagcccttcactcccgccagcgccatgacggcgaggatactgaatcgtggacggacggtgatggccttgccccgacgtttgcggcgaaaaattgtcagcttcatcgacagccatacccaggcgaagcgcatcagaccaagcgccagggtgatggccacggcgtacagcagcaggtaccagggcgaagagacgccggcctggctggctaccgccggcagcgtcctgaacatgcgcggcagctgctcgcccagcatcagaaagatcatcccgttgagggtggtctgcagcatggaccataccgcgctgcttttcatgcgcgtcgccggaagccggggccccgacagctgctcataatgcatcgcaatgccggcggcgacggcggcaagaatgcccgagacatggaacgcctcggccagcagataggcggcgaaagggataagcaggctgatcaggatctggatggctggctcctcgcgggtgcgccgaaccagaaagttattacatttgccggtgacccacaccaccacgaggccactgaggatgcccccgaaggccatcaggaaaaatttcaccaccgcgtctcccggggagaagctgccggtcagcaccgcggcgatggcgaagttaaaggcgacgaggcctgaagcatcgtttaacagcgactccccttcgagaatatgcgccatccttgagggaagcggcgagctggcggtcattgccgataccgccaccggatcggtaggcgacagaatagccgcgagggcgaaccctgccgccacggtgatagccgggatcagccagtgaataaacaggccaataccgagaatagtcaccatcaccaggcctatcgccagcgataaaatcggcttcatatcgcggaaaaaagcgtctttggggatgcgccagccatcgaggaacagcagcggcgggataaacagcagtaaaaaaatatgcgggtcaaaatcgacctgaaagccactggcggccagcgcggcgcccgcggcgatttggatcagcggtagcggcactttaacgggcagaagatgggacaggaacacggtcaccacgatggccatgataaagaccagcacgatagcaattagcgacattcatcccctcctctgacggcaatattcattctgtacatcaggctgttaatcctttttcgcaggtgttgtttcggtaacagattatttacccagtcaccgataatttaagacagacgtcattgtctgccggcgataatatttaaactgaggtggcaaccggtgccggatcaggggtgacaatgtcttttatcaagccgcgtttgtcaatccgctatcgtctgcaaatcatcgccggccggcattccggggagaagtcctcacaggactgtcgaccggggacttcgcaaattagcctcttcacatggacaaaaccactcaaccgctccagccctccgctgtttatatattcccaatattattaattcgtattatgcattgtgaatatggatattaatgaccagtctaatatacccggcagagttatatttcgtgcccccgccggcagtgcgaaccacgtatttgcgataaataattcttaacgcccccccatttcaggatgattggacagccagccttacgctacgcgcaatgcttgccctccccctgaattgggcgtaccctgacaaacaattaaaccacacggtctaaatcatgaatcccaatacctccaccgtcctgaagccccgccgcggccgtccacccaaggtcgatcgccagtttgacgatacgcgtcaggcgctgattcgctcaggccttgaagtgctgaccgaaacgggctatctcgcggcgggtattgatgcggtgatcaagaatatcgccgtgccaaaggggtcgttttatcattgctttaaaagcaaagaggcttttggcctcgccgtgcttgccgcctatggcgacttctttgcgcataaattagataaattcctgctggacgacgccgtgccgccgctggaacgaatggcggcctttgtgcgtcatgccggtcagggaatggagaaattccagtttcgccgcggctgcctggtgggcaacctgctgcaggaagccccgttgttacccgagacgtttccccaacggttgatggctatcctggcggcatgggagtcgcgcgtggcgcgctgcctgcgcgaagcgcaggcagccggggccatcgccagcgacgcctcaccgcaggcgctggcccaggtgttctggatcggctgggaaggcgcggtgatgcgcgccaggctggtccagtctgccgcaccgcttaaccagtactgggatttttttgcgcacagtatgacaacaaaaacacctgcacaggacggcgctagcgccgataacccccttccgacgaggaatactctgtcatgaaagcattagttctggaccagatcgacaaccgcaccgtcgccatcgtcaaagatatcgacctgcccgctcttgccgaaggcgacgtccgggtcgccatcgactggtcgagtctcaattataaagacgccctggcgatcaccggcaaaggcaaaattatccgtcagtttccgatggtgccgggcattgattttgccggtcaggtgaaagaaagccgcgatccgcgctttgttcccggccaggccgtgatcctcaccggctggggcgtgggcgaaaaccactggggtggtctggccaccgaagcctgcgttaaaggcgactggctggttgctctgccggagacgctcagcgcgcgccaggcaatgatcatcggcaccgccggctttaccgcgatgctatgcgttgatgctctcgttagtgcgggtgtcacccctgatagcggggatatcctggtcaccggcgccagcggcggggtcggcagcaccgccgtggtgttgctgaaagcccttggctaccgggtgacggccgtatcgggccgggaatcgacacacgattaccttcgccagctgggcgccgatacgatcctgccgcgcagcgacttcgcggagacccgtccgctggagaaacagctgtgggcgggcgcggtggataccgttggcggcccggtgttggccaaagtgctggcgcaaacgcaatatcgcggctgcgtcgccgcctgcggtctggccgggggtttcgatctgccgaccaccgtgatgccgtttattctgcgcaatgtgcgtctgcagggggtggattcggtgatggtgccgaccgctgaacgcgacgctgtctggcagcgtctggcccagcttctgccggagagctactaccagcaggcggccactgaaatcacgctggagcaggcgccagcgtatgccgcagatttcctcagcaataatattcatggtcggacgctggtcaatatcggtcagtaatcctcttctcccggcgcccgtgcggcgccggatcccgagagggatcaaggcatatcatttccttccccacgggattatgatgacgcgaacgaatagctctgcgagtggtaaaaaaagtaaatggatgtcataagcatcattatggcggcgggcaagtcgtccgttgacgtcgcgctgtatacgctgttgccgatcatggtgatcatgctgatcatcatgaaataccttgaggtccgcggtatcctcgatgtgattgttcgctgggtggccccgctgctgaagcccttcggcttaaccgggatgagcgccttcgccctgatccagattaattttgtcagctttgccgccccgctcgccacgctgtcgattatggataaacgcggcgtctcggaccgacaaatggccgccacgctggccatggtgttcgccatggggcaaggcaacgtcttctatcctcttaccccttttggtctgcactggctggcctcgatcgttatctcggtggtcggcggcctgtgcgcggccgccgtcgcctggcacgtcaccggacggcgcttatcggtcgccgagaacccccgcgcggaagcgctgccgaacgccgagcagaacagccagggaattctggccgtgattaacagcgccggctccgacgccatccgcctggcgctcggcgcggtgccaatgctgatcctgtcgttaaccatcgtcgggctgctgcagggcgccggggctatcgacctgctgcagcagctgctgaagccgcttctcagctggctgcacatcccccagaactttgtgctaccggcgctggtgaagtgcgttgccgggggcaccgcctactttggcgtcatttccgagctgatccagcagggcaaagtcaccgtgggccaggtcaacgcctcggcaggtctactgatccagacctttgatcttcccggtatcggcatttttcttggcatcagctcacggtttgtccgcctgttccgcttcgtggctcccgcggcgatcgtcggtatcctgctgcgtaccgttctgcacctgatcctgttttaacgcctctgctctggcctgcgctttcaggcaggccgccaccgccgcctgttcgccgcaggcgatgcgctcatcgacgcgcgtcatcatccatggaaagaatggattggaggtgacgcgcattaacgtctccagccccacgctcagcgtcccggtctctccgcgcagtgaaatggtgcccaggctaatgccgtagcggttcttctcgtccggctcgcgaccatacagcgagtcgctcaggggaaacggcaccgccacatgcgacaaagagtacatatccaccggccaggccagatgtaaaggataacgatgctcttcccgatcctgggccagcgtggtccgggcgacggtctgcagcgtgtgtgccgtcgcgttggtcaccaccgtggtggtataggcccgcggcgccgggggcagcagcgtattcaccgccgcatagagcgcagggcgaaacaggacccggagatccgccgcctggttaatatcgaacaccaccagctcgctgccgttatccggcagataacgatacagggactccaccaccgcgcgggtgctgaccgtggaatccatcaccgactgaaaggtgaggatcggcggcagcgctttcagctcgccctgccgggccgcacggataatctgctgctgcagcgcctggctcaataaccacgattgtctcgccgccttgaccggaaaggagttgtacttgaacggattaaactcaggcgccacgttcagccaggccgcgcgggcgaacgccgggaagacggacggtagcccggcgaggccggcgaaacgggcaaacgcggtcacgccgatcatcggcgacagcagaatgatctgctgcggctggcgcaagtgattgtcttccaggctatcgagggcatacttgagcgccagcgcgccgccgttagagtagccgaccagatgcagcggcacgtccgccccggcaaggcgggtcgcttcgcgtaccgccagacgcgtcgccgccagccaggtctcccagtcaaccgccgttaacgcccccggcgcggtgccgtgtcccggcaaacgcggcgccaccgccacataaccccgctgctgccagagttgcgccagatagcgcacgctgtagggcgaatcggtcaggccatggaggagcaccacgccgccgcgcggcttgcccagcggcatcagcacaaaagaacggttccagtcctgcttaaactgccccggccagacccggctgtgacgataaaagcggttgaccggggttttatcttcctccggcaaagcctctgtcacctcacgctggagatcggcgaaaatcgtcttctcccgcgccagatactgggcaaaggtcgcctggtcgatctcttcggccgacatctcgttgccactccaggtatgccagcgatgcagggacgggccgcgttgggactcatagatccgcccggcgagaaagaccaccagcagcgccagtaccgcaatgctcccttttttcagcagtgagccgataacggcgccggacgttcgccagtgtcgaaatagatgcttcatgacgctctctcttatatttattgcgtagccggacttatcagccctcttcctgacaggctattctcacggtctgcttttcagcatagtcatcgcttcctgcaaattaaacccggcagatcattgccccccggcataaaaaaacctagcgcacagatcaacaatcggttgcgtatttttaaacactgcataaaccaaggggataatcttattgtcagatttttaagaaacatgaattatcgacgcacatgtcgctatgagaggataaaaaacagatggagtggtgggtaaaaaaagtacaggacaacgcttcggccagcctctgccgcgtcgtgcttcagagcggtgcgctagagatgatcgcagagattgaagcctgtcgcctccgcctgcgggaaggggataaactcactccgctggccgatgcgcgctattgtctgaataataatccgacgcaaactttgaagatccgcaacgccactcattatagcagcgagcgttggacaaacgccggcaaataacacgagcccgctccctttactggttatggtctgagtatcgtcgcatttgacagataaattctccttcgcccttttcccgctgtgacatactatcgggaatgtcagcagacctgaaacaaggagcgaatcatgaatatcaaggccgccagtctgaccccggaacaagcgcttgccgagctggaagcacgctatgaagcctcggtcacggcgttacgcaaagccatcggcgactatatcgaccataatacgctccccgataccgaagcccgcgcggaaggtctttttgtctatccgcagctgtcggtctcctgggacggcgccgatcataaagccctcaaaacgcgcgcctggggacgtttcacccatgccggttgctataccaccaccattacgaatccgaaactgttccgcaactatttgctggaacagctgaccctgctgtatcaggactatggcgcgcatatcagcgtcgagctgtcgcagcatgagatcccctatccttacgtgatagatggttccaccctgacactcgaccgctctatgagcgccggtctgacgcgctatttccctaccaccgagctgtcacaaattggcgatgagaccgcggatggcctgttccatcccaccgagttctatccgctgtcgcactttgacgcccgccgcgtcgatttttcgctggcgcgtctgcgacactacaccggcacgccggcggaacacttccagccctacgtgctgttcaccaactatacccgctacgtggatgagttcgtcagctggggctgcagccagatcctcgatcccgacagcccctatatcgctctctcctgcgccggcgggatctggatcaccgccgagaccgaagcgccggaacaggccatttccgatctggcgtggaagaagcaccagatgccggcctggcatctgatcacccacgacggcaaagggatcaccctgattaacattggcgtcggcccggccaacgccaaaaccatctgcgatcatctcgcggtactgcggccggacgtctggttaatgatcggccactgcggcggcctgcgcgaaagccaggccatcggcgactatgtgctggcccacgcctatctgcgtgacgatcatgtactggatgcggtgctgccgccagatattccgatccccagcattgccgaagtgcagcgcgccctctacgacgccaccaagcaggtgagcgggatgcccggcgaagaggttaagcagcggctgcgtaccgggacggtggtcaccaccgacgaccgtaactgggagttgcgctattccgcttcggcgctgcgctttaatctcagccgggcggtagctatcgatatggagagcgcgaccatcgccgcccagggctatcgcttccgcgtcccctacggcacgctgctctgcgtctcggacaagccgctgcacggtgaaatcaagctccccggccaggctaaccgcttttacgagggcgctatctccgagcatctgcagataggcatccgggcgattgacctgctgcgcgccgagggagatcacatgcactcgcgtaagctgcgcaccttcaacgagccgccgttccgttaatcgtcgatgacgtgggaatcgtgagataaacgctgacgttacccgccagggagcgtcagcgtccggataagcgaaacaaacgacccggcggtgtttgtccacggaagaaaggcggtagacagaaaagcaaaaagcctgctcgaaagcaggcttcttaaatttggctcctctgactggactcgaaccagtgacatacggattaacagtccgccgttctaccgactgaactacagaggaatcgtgtgaacggggcgcatattatcgatgacgcccggcgctgtcaaagcctgttttcaataaaatgaatcgtttgccgaattattcttcactttgcgcaaaaaatggcgattagcctcgcaaacggctcagctttcctccgatgaagccttcacgcgcggatatttccacagccagcggccgctcaccatgcggaaataaaacagcacgccgcgcaccgcccagtcgagcaccatccctaaccagacgccaatcacccccatccccagcacgatgcccagggtatagcccgccaccacccggcagccccacatgccgagcatcgacacccacatggtgtagcgtacgtcacgggcgcctttaaaagcgcagggtaaagtccacgacagcgaccagatcggcataaacagggcgttgagccacagcagctgtttaaccacttcttttacatcttcttcatgggtgtagaacgaggcgataaagccggcgaagggggcgctgccccaggcgatcagcgtcagaataatcgtcgacagccaaaatacgtgccaggcctggaattcagcctgaccaatctgcccttttcccagccgcttgccggtaatgatcgtcgaggcggagccgagggcgttgcccggcaggttaattagcgaggccaccgaaaaggcgataaagttgccggcgataacgttggtgcccatcccggcgacaaacatctgggtcagcagcttgccgccattgaagaggacagattcgatactggccgggatgccgatccccatcacctcccagataatggcgaagttaaagggtttgaagtaacccttcagcgacagccgcagcgccggattgaggcccaccatcagcacccagatcgtggctatcgcgccaatatagcgggcaatggtcagcccaagcccggcgccgacaaaccccagccccggccaggagaagatgccgtagatgagcacgctgctgattaagatattgaggatattcatcccgccgttgatcagcagcgggattttggtggtgccggcgccgcgcagcgccccgctgccgatcagcgcaatcgccgctgccgggtagctcagcgccgtcagttccagataggtcagcgccaggtccttgacctgggcggtggcatcgccggcgacaaaatcaataatctcctggccaaaggcatggatcacccccgccagcaaaatggaaaacagggtcataatggccagcgactggcgcgcggccgccctcgcccgccgccgatcgcgcttgccgaggctaaaggccaccaccaccgtggtgcccaaatcgatggcggcaaagaaggacatgatgaccatgttaaagctatcggccagccccaccccggccatggcctcttttcccagccagctgacaaggaaggtgctcaacacccccatcagcagcacacaggcattttccagcagaatgggcacagcgagagggctgatttcgcgccagtacagcacacgataacgctgacgttttttaaaccaggatgtccgttcgacggcctggcgtacggcggaggtgacgttcaagagagaccttagtgagaaatgttgaaacaacatttcaaatgatgattgagaaatggatatcctgcaaagtattttccgtaataattgtcggaaatgacaacaaattgtcgatggaagcggcagttgcacctgaacaggcgaattgatgtttgacaaaagttttttcgccgctaagatacgactccacacgattcctctgtagttcagtcggtagaacggcggactgttaatccgtatgtcactggttcgagtccagtcagaggagccaaatttaagaagcctgctttcgagcaggctttttgcttttttgcgtcgctgacgttaactcagcatcgcatccagcctggcaagcacctcgttgacaacgacgccaggtatgcgttccagacgcttgcctttccctaccgccttcctacgccccgcgtgtcctccgtgagcgcaccccagctcagcctgaaaaagcgcctgccagtaggatgaattcactaccgtttgcgggtgagatagcgtggattatccactctgtctaacgttatacccggaggcaccatgaacctcagacaacagcaacagcaggcgttcgatcgcagcggagaacctcttatcgtcggcaacgtcagccactgcccgctgccgcccgagaccctcgccgcactgggccccgattccccctatgtggtgcaggtatacggctcaggcctgaccggcgaggtttatcgtctgcgcatcgccggcaaggagtacaatttaaagaaacgtcgcgccgtcgccggcgttgccaacctcaacggccagctgtcgtttttaaatgaggtacagcgtcggcaggcattgcaacagctgaaggatgacccggtcaccgcgccgcgcttcacccacatcgtcccaacgctgtatgccgattatcgcctcggcatcctgctctccccctggatcgatggcgagccgatacaccagttgaccccgccgctgatcgcccagctatttactactctggaagcctgcgaagaacaggggctgatggagtgggatctctgtagcgggaatctgctggtggaccggcaggagcagctatggctgttcgattttggctatatgtatcccttcgacccgctgagagaattcaacagcaatggtctggccgacccgctgttccactttgtcgaacgttttgagactcgcttcttttttagctggctgatgacccggatccctgacgccgaacagcagctggcgcaatatcgcgagatgaagcggctggcggtcgaaagctaccgccggaagctcgtctggcttcgcgcccggcgcgctgacccgctggtgctggctcactttcagcagttgacggcgcgctgggagtcggcgctggcggaccctgccgcgctgagccggctgtttgccgtagaggcctttcgctcacatgtgctggatattgaagacgacctgcatggtcagtcctgtaccttactcaccctgcaacgcattgattgggtgataaaccagctggaacagcattatcgctttatcgccgacgaaggcggcctgttttacgacaatgttgggaaatctcagcaggcgctgctcagcagctatgcgcagaagcggcagcaggcgcagcagtacctgttgaaggccaccgccgcaaaggattaacggcgctcgcgtccctgcttctgcttcgcctggtacatcaggcggtcagcggtggccaccagcgcgttgagactgggatggctggcgggatcatattcgacgcagccccaggagaacgccagctgccagggattggccgcctgctggttgaaacgcgccacgttgtggctgagcgtctccatcgccgtcgcggcatcgtggcggctggtattggcgaacagaatgataaattcgtccccaccctgcctcgcgaggatatcggactcgcggaaggccgctttcatcaagtcggcgatggcgatcagcgcgcgatcgccctcttcatgcccccaggtatcattgatgtgcttgaagcgatcgaggtcgacaaacgccaggctcaccggctcatggcggcgctgggccgtcagcagggcatactctgccagggtgaggaacccccggcgattaaacagtcccgtcagctcatccgaggttgccgcatccagcaccttgaactcatcctccacgatcgccgccagatcgcttaagatctgcatttcatgggcggaaaacgatcgcggctggtgatccatcagacagaacgacccgacggtcgcgccatccggcagttgcaccggatacccggcgtaaaagcggataaacggcgcctcaataaccagcgggttatcgtgaaagcgctcgtcctgctgcatgtcgttgacgataagcgggtcggtttgcagaatggtatgggcgcaaaatgaaatatctctcggcaccgtgtccacatcgagaccggcacaggacttgatatgcaggagatcttcccccaccagactgatggacgccaccggcaggttatacagcgaacgggcaagcctggtcaggcgatcgaagcgttcttcttttccgctattcaacagcccggaagagcgtagcgattgcaggcgacgctgctcgtcgggatgaagtccggctaatttcattgtctctcacttgtctcttgcgcagaattccgccgggtttccgcagagaaacccggcgttttatcctgcgaggggaaaatagtcgtcaggtaccccatgagttaagcagatttcctctgcacgtcaaccggcgcgccccaggcgactggcgcccagggcgctggcggaatgccattaacggcactctgcccggcaaatagggcagatcaggcgcggataaacgccagcagatcggcgttgatagtatcggcgtgggaggtatgcatcccgtgcgggaagccaggataaattttcagctggctgttcggcagcagcttgtcctgcaggatggccgcatttttatagggcaccacctggtcgtcatctccctgcatcaccagcaccggcaaagtgatcgacttaaggtcttccgtctggtcggtctctgaaaacgccttaatgccttcataatgggctttagcgctgccgatcatcccctgtcgccaccagttctggatcgtcccctgggatatctctgctccatcacgattgaagccatagaacgggccagaggcgacgtcgagatagaactgggcgcggttcgccgccagcgctttgcggaaaccgtcaaacacctcgatcggcgtcccgcccggattctgctcggttttcaccattagcggcgggacggcgctaattaacaccgccttcgccacccgcccctgcggctggccgtagcgggcgacgtagcgggcgacctggccgccgccagtggagtgcccgacgtggaccgcattgtgcagatccagatgttccaccaccgccgaaacgtccgccgcgtaatggtccatatcgtgcccctcgctaacctgatcggagcgaccatgaccccgacgatcgatagcgatgacccggaacccttcggcaaggaaaaataacatctggttatcccagtcgtcagcgcttaacggccagccgtgatgaaaaacaatcggctgagcttcctttggaccccagtctttaaagtaaatattgacgccgtcttgggtggtgacaaatgccatattacagactcctcttttcaggataaccagcctgcaggcccgtgcctgggctgaacgccgacggcggccggcaggagtgccgaccgcacaggaatgtgatgcctgtaacagtgtagaagatatttaacgccgggcgggacaacttaccctgtctcgcttgattcgccgatcctggaccagaccgcgtctggtatcaggccgcactctcctgctggcggatccgcaccatcagcgcgccgagcagcgcccagtcaagcagcacggcgaaggcaaagcagacgccatggcgtcctcctcccgcagtatgccaggtcagcagcgtcgccgcgatggcgatagctacgctcagtaccgtggcgccgctgacccgcatccccggcagcgccgtcctacccgccgcaatgcgccaggcgacagccgctcccgccccaccgcacgccacgcccggcagcagtgccggccagtcctgcccgccataccaggccaccagcgccagcagccagccggccgctgacagcagaaaggcccagcgcgtcgccgccaggggtgagcgataaagccaggattgtccgcgtgtaaatccccacccgacgccaaaggccgcaatcagcgccgtcagcagactcagcgtgccggtcaccccgataaccgggggcatgattaacagcaaggccccggcggcgatgaccacgctaagggcgatagcgcggccgcgggggtcgatcgttgccgcggcttccgcggcggtgtagcggcttacaacgtgcatagttgactcctgacaggcgaagctgcatgaatttaattcatgtcattgtctttacatgcccgtagcctatcgccacaatatcgctttacacaaacgcatagttttcagccatagatgagaaaaactcagccatgagaccgccccgtctgccgccgctgggggcgctacgcgcttttcatgccgtcgcccgccaccgcagttttaaacaggccgccgaggcgctcggcgtcagcgcgacggcggtcagccatcagattaaactgctggagtcggtgctggagtgccgggtctgcgaacgcagcgcgcagggcgtcagtctgaccgctgatggcgagatcctttacgccgccacccaacgcgcctttagcgccctggaacaggccgtcgtccagatcgctcatgcccgtcagccgccatccttaaccgtcaccaccacctccaattttctcacccactggctggtgccgcggctggcggatttcaccgcccgctttccggctatcgacctgcggctacacaccagcgtcgaacgagtggatctgcatctgggcacggtagacgccgcgattcgctatcgtgaaacgtcggagcgggacctgtactgcacgctgctgtatgaggatcgctttatcgtggtcgccagcccgactctgggcctcagccggcctgaagatctgcagcgggtgacgctgtttcacgttgccaaccggcgcgtgccagctgattcgccgagctgggagaactggcgtcggcgctatggaccgccgacgctgaatattgatgcggggttaacctttagcgatgagacccatgccctgcaggcggcggtggccggtcagggagtggtgatcgccagcgaactgctggcgcgggatctgctgcagcgcggcgtattgtccgcgccgttcagcaacgcattgcctggcgcccgctactacctggtcactaccgaagcggtagcgcagcgggcggatattatcgctctgcgggagtggctgctcagtcagatggcgtcgggcgacggcggccatccgactgcgggatagcgggcttaccagccgcagacgttggtctcttcatcggactcgtagccgcgaacgatattgatcagatccttcaccgcatcagccgcggtgagtgggtcgcgcagcgccgccagcgaggaaaaggttttatcaaccgagacgccgttattgttattggtgaccgtcaacagaaactccccctcttccctgtcgtccggtaacttgctcagcaggtcattaacggcctccaccgcctgctgtggaatatacaacaccattggtttgagaaatattttttcctgcttctggtgaagtcggccattctctagcgctaaggtataacctttattttcactggtcatctcttgttatccctcgataagaatttttggatcaacataaaagtcgacattaaaaaccgtgtcctctgagagggcctcaatacagtgccacttctccggcggaaagacgccaaactggccggcttcaatagtcagggtttcaacgggctcggggctggtttcatcggcatagccgagatagcggatcgccccctgcatcactgagagacgagggtagacgccctgccgggtgccggcatccagatggcggcgccagatagaggccggggcggtctctttggtccacagcggcgtgctgcgggtgtgaacgtaatgggtgggaataatgattcgctgcataattgtgcctcactttaccgtctcaaacgcgacgttcagaaatagcctatatgatgcatatcatataccccttttaaacgttaaggatattattttgttgtggaattttacgcctactcctttttatacctcgcagggattagcgctaagagaaaataaaaaaggcgatttcaggatcctgaaatcgcccgggagaataaaagtagacacgttaaaaatttgttagcgcagcggactcggtttgccgattaaatatccctgaaccaggtcacagcccagcgcctgcagcgaagccaactgctcttcggtctctacaccttccgccacaatgcgcatatgcaggctctttcccatgctgataatcaggcggacgatatccagatcgtctttttgttccggaatattgatgacaaacgagcggtcgattttaattttatcgaacgggaagtagcttaaacgggacagggaagaatagccggtaccaaagtcatcgatggagatctgaatgccctgctcgcgcagctggctgagaatttccagcgaacgggtgttctcattgaatacgtccgactcggtgatctccagatcaagacgtcgcggatcgaggccggtctgatgcagcacctcgataatggtgtcggtcagcgatgtattcatcaactgaattggtgaaacgttgaccgagaccttcagcggcgtcgcccagctggccgcttcggcacaggcggttttcagcacccattcgccaagggcattaataagaccgattttctctgccaccggaataaacaccgtcggcggcacggcgccgcgcaccggatggaaccagcgaaccagcgcttcatagccgtagatttcgcgcgtgacggtatcggcgatcggctgatagtagactttgaactcgtcatgggccagggcctgcagcagatcgtcttcaaacgatttgttctcctgcaggcgctgcagcatccccggccggaagatttgcacatggccgctaccctcttttttcgcctcatacagcgcgaggtcggcgcacttgtacagataatcggtacgactttcaccgtcagagatcacgatcccaatgcaggcgtcgatattaatctgcgcatcgtagatctgatagggctggctgatcttctcccggataacattggcccgctcaagggccatctcctcagtgagatcgtaggagagcatcgcaaactcatcaccgccaaggcgatacagcgtctcggaggttttgcggaaaaaagagaggcgactggccagatcctgcagcagcttatcgccagcatcatggccaagggtatcgttcacatccttaaagctgtcgaggtcgaaaagcatcaccacggcgcatcccttatacggacgcacctggttgacgatctcctgcagccgctgccagaaagagagacggttgggcataccggtcagcgaatcatggtaggcatcgtactgcagccggcggttctgcacctgcagcttctctttcgaggcctgcagatcgttggccagcgttttcatacgaacatgggcgcgacgcagattattattctgtcggagcatcagcagaccgagagttatacacatggcgatcagcagaatggagatcaccgagtagatataatagagatgctggattttatcatgggtgatattaacgatattgatatcttgcgtcagggtggcggcggccattgaggtcagcggaccatccagctcgcttaacaccggcaggatctgtctgacctgctccggcgtcatggtatcaacttgtttatcgagcagatgaagattacgaatcagcgtcgcaaccaccgtcttccgctgctcgcttttattgataaatttacccagatcgccctcctgcagaagctcgatctggctcatcatgatctcaagacgcaggcgcacctcatcgtggtccgccccttcggccccaatcgccattcccgccagacgagactccagccgcatatattccgacaccatctgcgacattgaccacgagtccgtatagcgggtaaatttttgcaactcactttgtcgctcatgcaccagataagtaatatatccggtgacaacaaataacgacaaaataatagccgtgagtattcgattcaagatccaacccttattctataatcatctttgaaacttgccaggccgatcgggaataatagatctggttctgtaattcagcactgctgtcgtaagggtagacaataaataacgggcctttatcacgaatgcgcatatattgaccgttcatttttaacgccataatgaccgggaatttataaaaatcatcaatcgggataatggtggtgtagtcgttcagcgccagcacgcgggccgatgtgcctttcgcgccgactaaatccatgagtttactaaggggaataccgtcaaaacgaaccttgccggtgtaccagggggtggtggtttctatcgtcttcatccccagtttttccagcattgcgagatcaaaaacggccttgtcgccgacattcatatttccgatttttccggaaatggtcagtacaggttttcctgtcggcgcaggcagtttttcagcataagcagaaggcaacatgacagaacaaaataaaactgcaagaagtagacgcattttactcaccattccagagagggagacacgttaagtgtaaaccatttacgtcgattcttaaaaggtgtccatctttgttatccgttgatttaattaaaagtataagctggatggcaaattgccagaatgttaagtccagggtgtgatttcgaccgtctttcccatcgattcttttttgcgccatctcccccgcttagcaggcaaactactttcctccacggccgctgcgcggtagtctcagagcagacgcaacggtaaaagcgtctcattccaataacaatgaagtacgtgactgacaggacagggtatggattcaacaataagcgtgcagcccggcgaggcgccagattcactacatcgggcccggcgggcggcctggggtagttttgccggcgcggtggtcgactggtacgattttcttctctatggcattaccgccgcgctggtgttcaaccgcgaatttttcccgcaaatcggcccggcgatgggaacgcttgccgcctttgccaccttcggcgttgggtttctttttcgcccgctcggcggaattatttttggccacttcggcgatcgcctcgggcggaaacggatgctgatgatgaccgtctggatgatgggtatcgccactgcctgcatcggcctgctcccctcgttcaaccagatcggctggtgggcgccggtgctgctggtgttcctgcgagcggttcagggattcgccgtcggcggcgaatggggcggcgcggcgctgctctcggtggagaatgccccacaggggaaaaaagccttttacagcagcggggtgcaggtgggctacggcgtcggcctcctgctctctaccgggctggtatcgctgattagcagcctgaccagcgaccagcagttcctcagctggggctggcgcttaccgttcctgttcagcgtggtgctggtccttattgcgctgtggatccgtaacggcatggcggaatcgcaggagtttgaagcgcagcagagccaggacaacgcgccgcagaagaaaaagcggctaccggtagtggaagcgctgcttcgccatccgggagcgtttttactgattatcgccctgcgtctgtgtgagctgctgacgatgtatatcgtcaccgccttcgccctcaactactccacgcaaaacctcggcctgccgcgcgagctgtttctcaacattggcctgctggtgggcggtcttagctgcctgactatcccctgcttcgcctggctggcagaccgctttggccgtcggcggatctatatcaccggggcgctgatcggcactttgagcggtttcccgttctttatggcgctggagagtcagtccgttttctggatcctgttcttcgccctgatgctggccaatatcgcccatgatatggtggtctgcgtccagcagccgatgtttaccgagctgttcggcgccagctatcgctatagcggcgccggcgtcggctaccaggtggcgagcgtggtcggcggcggctttaccccgtttattgccgcggcgctggtcaccttctccggcggatcgtggcacagcgtggccctctatctgaccgcaggatgcctgctgtcagcgctcaccgcgctgatgatgaaaaagcaccccgtcgactgacccaccagcggagggcgtaacccgcgccctccggtaaggagaatacatgtctcagttaaccctggccgactgctggcctcgccgtttttccccctcttcgctggcgctgcagttttgcgaggatcccacccaggcggaacagccgctgtttgccaaagccagcgccggcgaggccgtcgcccagctctggcaggcgccgcagggattggtggtgccggggagctatcgtcagtttacggatctgccggcggtcagcgcgcattttgccgcgcgcggctggccggtatggcttcgccgctccggcggcggtctggtaccccaggggccgggcattatcaaccttagcctcgcctggccggtgcagcagccgctcggcgaagccgccgaaccaatctatcattcgctgtgcgctgtgctgcagcgcaccctcgcgcgcttcggcgttgccagccacccccgggcggtgagcggttccttttgcgatggccggtataatcttgcctgcggagaaggcgcggaggcgcgcaagattgtcggtaccgcccagtactggcggccgctggcggcgggcggcggccacgtggtgctggcccatgcggtgatccttattgacgccgatctgagcgcggcgcatcaggcggcgaacgccttcgaagcgcagctcggcagcgagcgggtctattgcgctgacaagaccgttactctcgcgcagctgcttcccggcgagcgccatctgctgccccgctttagcgaggcgctggcgcaggagctggacgcgtctcgctgaaggtcgctttcaggtagcggctgaaggtttccaccgcgcgcgacacgcgcggggtatagggccggatgacgtacagccgatcggcaaacacctctactggctgccacgccggcagcagctcctgcaccagcccgcggccaatggcctcccgggcgctgaaatccggcaacagcgccaccccaagccccgccagcactgcatcacgtagcgactcgctgttattggtggcgaatggcccctgcacgttgatggtcacccgagcatcgggcgactgacgggaggcgaacgtccactgcgggcgctgtggcccacggggataggtcaggcattggtggtggcgcagatcttcgggggtctccgggcggccatggcggcgaatatagtcggcggacgcgacggtaagcgtcgcggtgtgacacagcggccaggcgacgtgggtatcggggagcgcctcgcgtcgacagtggcggatggcgagatcgaacccttcgctggccagagagaccagccggtcggtgacctcaagctgcagatgcagctggggatgctgatgcaaaaacggcgcgattgccgggaccagctgctggcgggaaaaggccaccggcgcggtcaggcgcagcgttccccgcagcggcccgccttcatcgcaggcgccggtgaaaatatcccgcagctgaccaaacggctcgttgagctccgccaccagccgcagtccgtcgtcgctgaggctcacgctgcgggtggtgcgatggacgagggttttaccggtcacccgctccagctcgctgattttctggctgatagccgacttgctgatccccagcttttccgcggcccgggtatagcttttttgttcttccagcaccgtcagccagtacagatggggccagtaactctccggacgactctcgctcatgtgattgttcaccagtaaaaacaatgtattcaactatagcggtttttgccgacggcggcatcggctagcatcttgttgagcccatcattattccctaacgataaggagcacctgcatgccattactgacatttgacctgattgaaggccgtacggaacaggaggtcaaaaccctgctggatgccgcccatcgcgccgtgctacgcgccttcgaggtaccagaacgcgaccgttaccagattgttcatgaaaacaaagcccaccatatggtgattgaagataccggcctcggactgacccgcacgcgggatctggtggtggtgcgggtctataccagcccgcgcagcgaggcgcagaagcagcgcttcttcgccattttgcaggaggagctggcggaacactgcggcctgagcggcgatgacctgatggtgtcgattatcagtaacaagaaaggcgactggagctttggccgcggggtcgcgcagtatcttaccggcgatctgtaacccgcagcccgcagtacacccttagcggcgggctgccgtcgcgatacgctgccgcgcctgctgctcgatattctccagcaactcctggacatcgtcttcatcaatgtcgaggaactggccttccagcagcgcggcgtgaatatcttcccgggtgaccgaaatacccagcggcaccgccctggatttgacctcctctgccgccagcggatgcggataacggcggccaaccaggttattaaacacaatagccagcagcgccagcatcagcgagttgaggagcaccggggtcagcacaaagtgatagccttcgctgtgcaccccggcgccgccgaggatcgccgtcagggccaccgcgccgccggggggatgcagacagcgcagaaaatacatcccggcgatggccagagccgccgccagaccgcaggccagcgccgcatcggggaccagcatacccaccgtgacaccgatcagcgccgacagcacgttgccgccgacaatcgaccacggctgcgccagcgggctgctcggtacgccaaacaggagtaccgccgaggcccccatcggggcaataaaccacagattgacttcgccgagcagccagtggctgaacatgctggtcaccgccagtccggtgccggcgccaatggatcccagcacgatatgccggcgggccaccggcagcgcgtgcggcttcaggcggccaaggaaaatccgcagccgtgaaaatatccccgcaggaataacactcaacatcgcttcatcgctcaaatcataggaattacttatattttattttctttttttaaccttaaattaacaaccctgtctttcgcaggggatagcgcgggcggcgatgtccgacggcattgtgctgtgaattctcgcgggggctgatagaatcccttttcggtcagggggataccccttttgcgaattgaaggtcataacccagtgaataataaaatctctttagcgaaagaagtggcatgggccagccagaatatgccgcgtaccctgcgtcaggtcgccgcgctgcccgacctcagcggcgtgcgtctggcctgctgtatgcacctcgacatgaaaatgatcccgctggtgcaggggatcctcgacaagggcgctcaggtctttttaaccacctgtaaccccaccaccgtgcaggacgacgtggtggcctggctggtggagcgcggcgccgaggcctgcgcgtggcgcaatatgagcgatgccgactggcaacagtcatgggaaaaagcgattgcctggcagcccactcacctgtgcgagatgggcgccgatatcaccaccctgctccaccagcgcggcgagtttgggaacatcgtggcgggtctggaagccaccggctcgggcgtcaatcggctgggggatattcagccaggctatccgatctttaactgggacgatctgccggtcaaagaggggctgcacaaccgccatatggtcggtctcaccgcctggcacaccttcttccagaccactcacctcaccctgcatgagaaaaaagtgctggtgatcggctacggcctggtcggccaaggcgtcgcggcggcggcaaaagcttttggcggtcaggtgatggtggcggagatcgatcctgcccgccgtctgcaggcggcctacgacggctggcacgtggtggacctccaggaggctatcgcctcggcggacgtggtggccacagcgacaggcggtaaaaacgtggttaatcgccaggcgctggaccgggcgaaagcgggagtatttatccttaacgtcggccacgtggcggaagagatcgacggcgagtacctgcgccagtacccccaggaagaggtgatgccgtatatcaacgcctaccgcatggccgacaaaaccgtctatctgctggccaatggttcgatgctcaatctgaccgctggcttcggcgatagcctgaacgcctttgacgtcaccctggcggtgatggccagcggcatccgccatattgtcaccgacggcatgcgcgccccggcgaaggtttatctcctgccccaggcggtctggcagcaggccctgtaaacccggcgcatcacccccatcgcgggacgatgcgttttaccatcaggacgacggcgcgctatcgggcaacacaatattgctctgcgccagcgttcccatctggttgtacatcacgctggcggcatccaacaggtgcatcgccagcgcggcgccgctgccctctcccaggcgcatgtccatatcgagatacggccgcagacccagcgcgtcgagggcgatctgcgctcctttctccgccgacaggtgtgaaggaataagataagggtgcgccgacggggccatgcggcaggcggccagggcagaggcataggagaggaagccatccagcaccaccggcaggccacaggaggccgccccgaggatcaccccggtcatgcccaccagatcgtaaccccccaccttcgccaggacatccagcccgtccgccgggttcggctgattatgggctatcgcctggcgcaccaccgccaccttatggccccgctgcgccagcggcagattggccccacaacccaccaccgcgtcagggtcgctgcccgtcaggacactgatcgtcgctgcggccggggtggtattggccattcccaattcgccgacgccgaaggctttcaccccgtcggcagcgagctggcgggtgagctgcatgctggccagcagcaccgtctccgcctgctggcggctcatggccgccgtccgggcgatattcccgctaccgcgggccaccttgaggttaatcaggcccggcagcgggtcggcatcgatgccgacatccactacctgcaccctggccccggcctgcgccgccagcacgcagacgccggtgttgccccgcaccatattgccggcatgaatggccgtcaccccctgcggcgaaggggtcacgccttcatgccagacgccatggtcggcgcacatgaccacaatcgctttctccgccagcgccagctgcccctgcaagccaggcagaccggccagttgcaccgccagcgtctccagacggccaaggctgccgggcggctttaacaggccatcaatatgctgctgagcgcgcgccatgcccgccacatcgggctgcggaatggcagccagtaacgccgaaagtgttcccattctgttcctcaccgttggtgtcaggccttacagcagcgccagtaaaaagagtaattcgcccagctcaatcgccgccccgagggtatccccggtctgcccgccgagggttcgcttcagcgcccatcccagaccccaaatcagcaccagggtgatcagcgcggcgcgcagcccctgcagccccagcagggcggtggccagcgcgatcgccatcgccatcgtcaccagcgtctgctgcaggctaattttgccgataaacagattgcccagccccttttcccgcgcatagcgatgacgatacatcagcagcaccgccatcccgcgaccgacggcgcaggccgccgccagggctgcgatggggtggatatcacgcagcagcagctcgccaaccaccagcactttcgccaccagcacaaagatcagcgccagcccgccgtgggtgcccagccggctgtcgcgcatgatctccagcatccgatcgcgggtgcgggcggagaaaatgccgtcgcaggtatcagccagcccgtcaaggtggaatccgccggtgagcagcgccagcgccagcacgccgaacagcgccgccagcgggacgccgcaccacggctgcaggaggagcgccaccgcgccggcgatggcgccaagcagtaaaccgaccagcggaaaggtgacgatactgcgctggtactgttcgatctccaggccctgagataaccgcgccgggaccggcaggcggctgataaacgagagtgcagcaaagaatgacttaatcacgtgaggttgactcctgtcggcgaaagcagcggaagagttctgtcgcgcccggtcagcacctgagtttgtcttctggcgaatcgatcgtcggagaggtgagaggtgttgagatatcgccctgacgccgctgcgtcagatgcccggccaggatgagagaaacctttccgatatcaatacgtttttcgcgggccagtatagcaaagtgtcggtgaggagaggcagttgccggaacaaagttttcgcagaaaaaagcagggaagagagggaaacgcggaacagcccggcgacgcttaacgccgccggaccggcagggtttagccttcgactttggcttcgcccatcactttcagttttttcgagatgtcgcggcgctctttagacagctcggcatttttgatgatgtaatcatcaacgcgatcttcgtaatcgctcttcatgctggcgatgataccctggatggcttccacgctcatgcccggtttgatgtagtcgctgaggttgtccagcagcagaacgcgcttctggttatcacggatctttttctcaacgtcctgaatttcacgctgcagtttgttcttacgacggtacagacgaacaaactccagtacgtcctggaaagaaggcttagttgtttccatttttacacccctaataattgagattcggattcgtaaagcgactgcgttatagggctaacataactgctagcagccgctgatgacaatgttttttcctttgcgtttatcataaccctaaacgctgctgaatcgaaacaacccatgtggttacccggtgcatctgatgtttatttgcgcaacgcgcggcagatcagatgcgagagcagctccagctggcgcgccagttcgattgagagccaaacatagccatggaccggggtttccgccaggccgtcatcaccctgctctttcagcagctggcgcagttcgaggacgatctcagtcagcttttcattgttggcgcgcacaggctgagggttcccttcgtacagcgcgtgggcgatggacaacagcgtctgctgggtcatctgctgcgtctcccgcagggtgtgcgcattgagcatcacgaagtgacccggacgcgttgcccaccaggcgttgatctgcagctccagcatgcagacgaggttgcggctgacggtctggatagcctcgaagatcgccttctggatgtgcgtctctttgctggcgggggtgatcagcccgcgcattttaaccacgtcgttcagcgcctgctggagatgcttttccagccgcggtcgatccaccagatttggcgagaagccggcctggtagaggcggttaaagttggtgacatagctggccatctggatgcgccagtggatgaacgcccgctgcggccagatgccggtaaacagcatcgccagcagcgagccgaagatcacatcgccgcttcgccacagcgcggtatgcatatcgccgggcggcgccccgaccaccaccgacagagtaatgccgatcagcagcgcctgatagggtttcttgcccagcgccagccagccgcagaggaacatcgccgccgcgcaccagaggaccatcagcggcagagagatgagctcaagcttcagcgccaccagccccagcgccgaaccgaggatcgtgccgccgatacgctgaaacgcccgcggcacgacgttaccccagaaggagatcggccccatcaccaccaccagagtgatgagaggccaggttccctcaggcacgttcagcagccgcaccagcaaaaaggtgagcacaaaggccagtgcaatccgcacaccatgcaccacccgataatggcgatacaagcggatctcaaatggcttgagtgatttatcagcgcgcacaaccctctccggcaaaacgaaaaggccaattgtaactgctttttcgcccggagcatgccgggaatgtaaaaaaccttgtccgaaacaggggtaaaccgctacgacgcgacgcgctcaacgggaacatacatgtcgatatcccagtagccgtcgtggttgccgtcgttaagatagacctcaaagcagggctggggggcgatgcgatacgccgtgctctgctgcaggctgtcgaaaaactgcatccacggggtggcgaagtcgtaatccaccacccgcgcgcgggcgcaggcgtaatccccgccggcaatcgccgccaggatcaccccttcgctgttggcgggaatgacataatcctcatccacggcgaccgctgtcgcgcagcgcagtttttccgccggcacttcctccgggttatcgtagtagacggccacccattcgcgggcgggcacctggtggttctcaacccacatcatcagttgctcaaacccctgcttgacggtgtgatcccagggcccgaccagatggaaaccggcgatggttttcttgccgagggtggtgatgctgtagttcatcttgcctcctttggagataaattactgtatgaatatacagttaatttaacaggagatcccccctcagtatgtgcgcgaattcacagagtcgccaccacactgctgtaaaaacaggcgccccgccagcacgagcgacagacgaaaaaaaaccgcctgcaaagaggcggttggcgtggttacagctcgtgatgcaggtaatcgctcattcgcgagaacactccgcctttattgatgctttcgagggtgaccagcggatagtgccccaccaccttgtcgccgtcatacagtgaaatctcgccaacccgctgattggcggcgatcggcgcctcaagatccttcttatccagcacatatttcgctttaatgcgcgacacttccgccttcggcagggctaaccagaaatcctgatcggtgccgagcttaatctgctctttatcgccgtaccagatacgctcggtgccgaccttctgccccttctgcagcacctgcacggtgtcgaagttctgctgcccccagtgcagcagtttagcggcctgctgctcgcggcctttcggactgtccgcccccatcaccacggcgatcagccggcgctggccatccaccgccgaggcgatcaggttgaacccggcgcccgaggtgtggccggttttcaggccatcgacgttcatggttttatcccacagcagaccgttacggttttgctgggtgatcccgttccacgtcaggcttttctggctgtacatgtggtagacgtctggttcgccatgaataatcgcccgcgagagcaccgcgaggtcataggccgaactgtgctggcccggggcgtcgaggccgtggacggtttcgaaatgggtgtcccgcaggtgcagtttttcgacatactgattcatcagggcgacaaactgcggctggccgccggcgacatagtcggccagcgcgacgcaggcgtcgttaccggagtcgacaatcagcccacggctgaggtcgcggacgctgacgcgatcccctggctttaagaacatcagcgatgacccgtcgaacaccgggttgcccttcgcccaggcgtctttacccacggtgacgatatcgtcaaaggtgatacgatggctgtcgatggcgcgatcgaccacgtagccggtcatcagtttggtcagactggcaggattacgctgctgatgttcgttacccgcggtcaggacctgaccggtggtgtaatccatcagcacccaggagccagcctgaatggaaggcggcgcgaccgtagcaggtaagtcgacggcaaatgcgcaggaaacgctcgaagcgagcaaagatacagcaataaacaaacggcctttcaacggcatatcctctagatttacagatccgccgtcctttttacggaacttcgcgtttcatatcagggtttaattgcaagaaaatatgacacagcagaggaagttgcttgccgttacccttctgatgaccgggcaaatcgtttaccataccggtcgcacgccaccacggataatgaacagactatgcaagatagcgtcaaccagcccggatttttattccacgattatgaaaccttcggcaccagcccttccctcgaccggccggcgcagttcgccgccatccgcaccgacgcggagctgaatgtgctcggcgagcccgaagtgttttactgcaaacccgctgacgattacctgccgcagccgcaggcggtgatgatcaccgggatcacgccgcaggaagcgctggccaaaggggataatgaggccgcgtttgcccgccgcatccacgatctgttcacggtgccgcaaacctgtatcgtcggctataacaacgtgcgctttgatgacgaagtgacgcggaatatcttctatcgcaacttctatgacccttatgcctggagctggcagcacgataactcgcgctgggatctgctcgacgtgatgcgcgcctgctatgccctgcgcccggaagggatcgcctggccagagaatgacgaagggttgccgagcttccggcttgaacatctgaccgtcgccaacggtattgaacaccagaacgcccatgacgcgatggccgacgtatacgccaccatcgccatggcgaaactggtgaaaacccggcagccgcggctgtttgattatctctacagccaccgcaataagcgcaagctggcgacgcttatcgacgtgccgcagatgaagcccctggtgcatgtctccggcatgtttggcgcagcgcgcggcaacaccagcctggtggcgcccctggcctggcatccggaaaaccgcaatgcggtgattatggtcgatctggcgggcgatatggcgccgctgctggaactggatgccgatgccctgcgcgagcggctttacaccccgcacgccgagcttggcgatctgccggcggcgccgatcaagctggtgcatctcaataaatgtccggtgctggctcaggccaataccctgcgcccgcaggatgccgaccggctggggatctccattcagcgctgtctggagaatgcccagctgctgcgggcgaatccgcaggtgcgcgagaaagtggtggcggtctatgccgaagccgagccgttcgtgccgtccgaaaacgtcgacgcccagctttacaatgggttctttagcgatgccgaccgcgcggcgatgaaaatcgtgctggaaaccgaaccgcgcaatctgccggcgctggatattaccttcgccgataagcgtatcgaacgcctgctgtttaactatcgggcgcgcaacttccccggcacgctcgatgaacatgagcagcagcgctggttagagcaccgtcgtcaggtgtttacgccagagtttttgcaggcctatgccgatgagctgcagatgctgtatcagcagtatgcggatgataaagagaagctggcgcagctgaaggcgctgtggcagtacgcacaggatattgtctgattggctgaaattcccgggttgcggctaacgccttgcccggactacaaacgatgaccggggaggacgcctgaccgtaggcccgcgcaagcgcagcgccgccgggcattgcgtccccagttcgtgcttacctttttgcccggtggcggcttcgccttaccgggcctgggcgctggtaccagagtagcccgggtaagacgcctcgcgtcgcacccgggaacgttgcttagcttttcgcgcggctggcgatgatttcatccgccacattacgcggcgcttccgcgtaatggtggaactccatgctgtaggttgcccgtccctgcgacatcgagcgcagcgtggtggaataaccaaacatctccgccagcggcacgtcggcgcggatgatctggctgccgaagcgctcttccatcccctgcaccatcccgcgacgggaagagagatcgcccataatattcccggcgtactcttccggcgtctccacctcgacgtgcatcaccggctcaaggatcaccgggtccgctttgcgcgcgccctcccggaagccgaagatcgccgccatgcggaacgccatctccgaggagtccacgtcgtggtacgacccgaaggtcagggtcgctttcacgtcaaccaccggataacccgccagcacgccggtgcccatcgcttcgcgcagccctttctccacggaagggatgtactcgcgcggcaccacgccgcctttggtggcgtcctcgaagacgaaaccgctgcccggctccagcggctccagggtcagcacgacgtggccatactgccctttgccgccggactggcgcacaaatttgccttccacgtccgtcactttcttgcgcagggtttcgcggtaggtgacctgcggacggccaatgttggcctcgacgccaaactcgcgcttcatccggtcgacaatgatctccagatgcagctcacccatgccggagataatcgtctggccggactcttcatcggtatgcagacggaacgacggatcttccgccgccagccgctgcagcgcgatgcccattttctcctggtccgctttggtcttcggctcaatcgccagcgaaatcaccggctccggaaactccatccgttcgagggtaatcaccgcatccggatcgcataacgtatcgccggtggtcacatccttcagaccgacgcaggccgcgatatccccggcgtgcagttcgtcaacttcgtgacggtcgttggcctgcatcagcacgatacgcccgatgcgctctttcttacccttcaccgggttccacaccgcatcgcctttcttcagcgtcccggagtagacgcggataaaggtcagctggccgacgtaggggtcggtcatcagtttgaacgccagcgccgacagcggctcatcgttgctcggatggcgttccgccggctggccttgctcatcaacgccctgtatcgccggaatatccagcggcgacggcatcagctccaccaccgcatcgagcatgcgctgcacgcctttgtttttaaaggcgctcccgcagagcaccgcctggatctctcccttcaccgtgcgctggcgcagaccggcgacgatctccgcctcgtccagctcaccggtttccaggtatttatccatcagctcatcgctggcttccgccgccgccgagaccattttctcccgccactgctgcgccgtcgccaacagctcgtcagggactggcccatagctaaaggtcatgccctgggtggcgtcatcccacaggatggcgcgcattttcaccagatcgacaacgccggtgaaatgctcttcggcgccaatggggatcacaatcggcaccgggttagccttcagacggtcgatcatcatctgcaccacgcggaagaagtccgccccggggcggtccatcttgttgacgaaggccagccgcggaacgtggtatttattcgcctggcgccagacggtctctgactggggctgcaccccgccgacggagtcatacaccatcaccgcgccgtcgagcacgcgcatggaacgttccacctcaatggtgaaatccacgtgccccggggtgtcgatgatattgatccggtgcggctcgaagctgcggtccatacccggccagaagcagcttaccgccgccgaggtaatggtgatcccgcgctcttgctcctgggccatccagtcggtggttgccgcgccatcgtgtacttcacccaacttatggctcatcccggtgtaaaacaggatgcgctcggtggtggtggttttaccggcatcgatatgcgcggagataccgatgttgcgataacgttcgagagggatgggtcggggcatgatgcgtccttagtcgttttgacggtcagtctgcggtcggaatgatccgcagttcatttaactgcgtctatcttagtacaactgtacgagtatattcgaactatttttgctatcattacgattgggcaggttgcggcggcgcgcgtggtatcagaaccggagtttgggtatagtagccgccagccgccgatatgggctgcggctgcgatgcgccgcgccaccgccgacacaggattattatgatcgccaatcaccccgaacgagaacaaattcgcctggaaaatgtcctttccgcgctcggaaacccgctgcgactggagatcattcgtacgctggccgacggcagcgagctgagctgcaacgccctgcgccaggaggaggtggccaagtccaccatgacccaccactggcgcgtcctgcgcgacagcggtgtgatctggcaacggcctcagggacgggagaacatgatttcgctgcgccgggaagatctggacgcccgttttcccggcctgctggatacgctgctgaaagttatggtgcaggcaggataagctcttctgccgggtggcgcttcgcttacccggcctacataaccattaaatttcagaaggttaaccatcaccgtaggcccgcgcaagcgcagcgccgccgggcaaaagatatcgcaccgagccaaacgaaaaaaaagccggaggtttccctccggcttttctcaatcacatcacgctacgccttacgccacgtcttcgtactgcggcaccgggttgcggaagcttttggtcacgcaggccagatagaccagaccgataccggcccagatcaggcccagaatcatcgagctctcttccaggttgacccacagcgcgccaacggtcagggcgccgcacatcggcaggaacagatactggaagtggtctttcagcgtcttgttgcgcttctcacggatccagaactgggaaatcaccgacaggttaacgaaggtaaacgccaccagcgcaccaaagttaatcagcgccgtcgccatcaccaggtcgaagttaatcgccagcagcgcaatcgcgccgaccaggatgatgttcatcgccggagtgcgccaggtcgggtgcacgtatccgaagaagcttttcgggaacacgccgtcgcggcccat

SEQ ID NO: 5352 - DNA, 10936 bp, Unknown
  gut microbiota DNA sequence
cttcgcgatgatgcgctgaagctggcgctgctggaagagaacaagctgctgccagaggtacaaaaccagctgttgagcagcttgtcggaagaggccttcggtcagcgctggctgtcgacgcaggaaaccaacgcgctgttccttgccgggcgtacgcttgccgacctgccgggcaactggcaggcgcaaacgtcgctgcaggcgcagccgcttgccagcgacaaagcgcaaacccgtaatctcgacggcgatcggctggcggcgctgcaggtgacgaataccggcaatcagccgctgtggctgcgcctcgatagcagcggttatccgcaaagcgcgccacagccgggaggcaacgtgttggggattgaacgcgctattttcgatacccacggccagcagaaatcgctgacctcgctgcgcagcggcgaactggtgctggtcaagctggaggtgaccgccaaacgtaacgttcctgacgcgctggtggtcgatctgctgccggcgggacttgagctggaaaaccagaacctggccaatagcagcgccagcctgcaggagaatggcgaagcggtacaaaacctgcttaaccagatgcagcaggcggatattcagcatatcgagttccgcgatgaccgctttgtcgccgcagtcgccatcaatgaaggtcagccggtgacgctggtctatctggcgcgggcggtgacgccgggcacctatcaggttccgcagccgcaggtggagtcgatgtatgtaccgcagtggcgggcgaccggaacggccagcggcccgcttaccgttacgccgtaaatgcgcgcattaccttgcataaaacgccgctggcgctggctggcggcgtttatttttctgctgtggttagcggtgctgctggccgatcgtctgtggccgctgccgttgcatgaagtcaccccagcccgcgtggtggtagcggaagacggcacgccgctctggcgctttgccgacgcgcagggcgtctggcgttatccggtcaccatcgccgacgtttcgccgcgctatctgcaggcgctcatccagtatgaagaccgctggttctggcgccatccgggggtcaatcccttcgcggtgctgcgcgccgcctggcaggatcttacttccgggcgagttatctcgggcggcagcacgcttaccatgcaggtggcacgcctgcttgatccccatccacgcaccttcggcggcaagctgcgccagctgtggcgggcgctgcagctggagtggcatctgtcaaaaagcgacattctaaccctctatttgaaccgcgcgccgtttggcggcaccctgcaggggatcggtgcggccagctgggcctatctcggtaagccgcctgccaggcttagctacggcgaggcggcgatgctggcggtacttccccaggcgcccagtcgtttacgtccggaccgctggccgcagcgggcccaggcggcgcgtgataaagtgcttacgcgaatggtcagccagggcgtctggccggagcaggcggtaaaggaagcgatggaggaaccagtatggctgtttccgcgccagatgccgcagctggcgccgcttttttcacgccgcgcgctggcgaccagccgtgatgaaaaggtggtgacgactctggatgccggactgcagcggcaactggaagatctggcgctgaactggaaatcgcgcctgccgccgcgcagttcgctggcgatggtcgtcgtcgaccacacggatatgaaagttcgcggctgggtgggctcggcggatatcaccgacgacagccgcttcggccatattgatatggtctcggcggtacgctcgccggggtcggtgctgaaaccctttatctacgcgatggcgatggatgaggggctgattcacccggcatcgctattacaggatgtgccacggcgttttagcgattatcgccccggtaatttcgacagcgggtttcatggcccggtgagcgccagcgaggctctggtgcgttcgctgaatctgccggcggtgcaggtgctcgaagcctatggaccaaaacgctttgcggctaatttacgcaacgccgggctgcccctgacgctgcccgctggcgcagagccgaatctgtcgctaatcctcggcggcgccggggcgcggctggaagatattgtcgcggcgtacagcgccttcgcccgccatggcaaggcggcgcggctgcgcctgaagccgagcgacccattgaccgagcgcgcgctgatgtcgcccggggcggcatggatcgtccggcgtattttggccggcgaagcgcaaccggttcccgatgcctcgctgccgcaggcggtgccgctggcgtggaaaaccggcaccagctacggctatcgcgacgcgtgggcggtcggcctcaatgcgcgatatctgataggcatctggaccgggcgcccggacggtacgccggtggtgggccagtttggcttcgccagcgccgtaccgctgctcaaccaggtcaataatctgctgctggcccgcccggcgatgagccgcggcgggctgccgagcgatccgcgcccggcaacggtcagccaggggacaatctgctggcctggcgggcaggatctgccggcgggcgacagcaactgtcgtcgtcgcctggccagctggcttttggatgccagccagccgccgactctgctgctgccggggcaggagagcatacgcgggatccgcttcccggtgtggcgcaatgaacacggcgaacgggtggcggcggattgtcccggcgctcgggaaagccaggtcgaagtctggccgctgccgctggatccctggctgccggccagcgaaaggcggcgcgcgcgcctgggaccggcatcggagtcatgcccgccgttacagactcaggataccgcgccgctggtgctgtccggcatccgtgatggggcggtgataaaacgtctcccgggtgaggcgcgggtgatgttgccgctacaaaccagcggtggggaggggcggcgctggtggtttattaatggcgaaccgttagaggccgccggcgcaagaaccacgctaacgctggataaacccggcgagtggcagttggtggtgatggatgaagcgggccagacggcagccgccagctttaccctgcaataaccagggtaaatttgttgttggcggtttgtgttttcaatactcatcttattttaacaaaatgttaccttcatccgtaggcaggggcggggatgctcattataatgcgcgccaggccatacaatcgtatgtgcaacaacagaacatttaattagaggtaatcatggctattgaacgtactttttccatcatcaaaccaaacgcggtggcaaaaaacgttattggcagcatcttttcccgctttgaagctgcagggttcaaaatcgtcggcaccaaaatgctgcacctgaccgttgaacaggctcgtggtttctatgctgagcacgaaggtcgcccgttcttcgacggtctggttgagttcatgacctccggcccgatcgtggtttccgttctggaaggcgaaaatgcggtacagcgtcaccgtgacctgctgggcgccaccaatccggcaaacgccctggcgggtaccctgcgcgctgactacgctgacagcttcaccgagaacggcacccacggttccgactctgtagaatccgctgcccgcgaaatcgcgttcttctttgctgaaggcgaggtttgcccgcgcactcgctaatctcctgcgtctttcacgccacagcattgttggcttccttcgcgcaccccggtcacatagttatctatgctcccggggatttgcgaactcgccgtctcgctgtgacctgaaatactttggagatacaaacctcgtcttttcgaccgtcgcggcgttggctgcgcgcgttcaccccggtcacatagttatctatgctcccggggattaatgagaggctcctgcctctcaccggaggccagcctacggctggtcaaattcgttcccgacgaatttgtcacttgcttgccgccttgcgacaatcgaaaagccttagaggattgagcagtcagttacagattttttttcattgctttgtgcaaacgtggcaatgatgcgccagaatttgtagaatatagcgcccctggacgagcagtcgctctccggggcgtttctttttcaacccacctggggccataacgtgtaataacgaggccggaaaatattatgtctgaacaaattgtcacgcctgataccgccgctctgacggtgccgaacaaagatgccaaaatcaacctgctggatttaaaccgtcagcagatgcgcgagtttttcaaaaacatgggcgagaagcctttccgcgccgatcaggtgatgaaatggatgtatcactactgctgcgacgactttgatgagatgaccgacatcaacaaagtcctgcgcagtaaactgaaagaagtggcggagatccgcgccccggaagtggttgaagagcaacgctcaaccgacgggaccattaaatgggcgattgccgttggcgatcagcgcgtcgagaccgtctatatcccggaagaagaccgcgccaccctgtgcgtctcctcccaggtaggctgcgcgctggagtgcaaattctgctccaccgcccagcagggctttaaccgcaacctgcgggtatccgaaattatcggccaggtctggcgcgcggcgaagatcgtcggcgcggtgaagaccaccggcgtgcgtcccattaccaacgtagtaatgatgggcatgggcgagccgctgctgaacctcaacaacgtcgttccggcgatggaaatcatgctcgacgatttcggctttggcctttccaagcgtcgtgtgaccttgtctacctccggcgtggtgccggcgctggataaactcggcgatatgatcgacgttgcgctggcgatctccttgcacgcgccgaacgacaccattcgtgacgaaatcgtcccgatcaacaaaaagtacaacatcgagacgttcctcaactcggtgcgcggctatatttcgaagtccaacgccaaccagggccgggtgaccatcgagtacgtgatgctggatcacgtcaacgacggcaccgagcacgcccatgagctggcggcgctgctgaaagatacgccgtgcaagatcaacctgatcccatggaacccgttcccgggcgcgccgtatggccgcagctctaacagccgcatcgaccgtttctccaaagtcctgatggagtacggctttacgaccatcgtgcgtaaaacgcgcggcgacgatatcgatgccgcctgcggccagctggcgggcgacgtcattgaccgtaccaagcgtacgctgcgtaagcggatgcagggcgaagcgattgacgtaaaagcggtctgacaaatgatgacccgtgcagcgcaggcggcacgggtcatatttatggccgatagccaggcgaaatacgctgattcggttaataattacggtgcgtttttgtcgactttgaggcagtatgtagcggcacaacaaccgcttagcattcaattttgattcgtctctgtgatcgcgcggctgacagtcctatactgtgaggctgacgtagcacagatgtctcgcggcgccggctttttcccgcgctgaactttaaatttcacgtaccagtagttgtagcgaatgaatactgaagccactcaagatcatcaagaagcaaacaccacgggcgcgcgtctgcgtcacgcccgcgaacaactcggacttagccagcaagcggtggccgaacgcttatgcctgaaggtgtccacggttcgtgatattgaagacgataaggcccccgccgacctcgcctccaccttcctgcgcgggtacatccgctcctacgctcgcctcgtacatattccagaagacgagctgctgccgatgatggccaagcaggcgcccatccgcgcggcgaaagtcgcgccaatgcagagtttctctttaggcaagcgccgcaaaaagcgcgacggctggctgatgagcttcacctggctggtgctgtttgtggttatcggtctgagcggcgcctggtggtggcaagaccataaggcgcagcaggaagagatttcgaccatggccgatcagtcttccgctgagctgaacggcggcgacgccaacagccagaacgtgccgctggataccagcgcccctgcagccccgaccgccgatagcgccgcgaacagcgcgccaaccgataccgccagcgcaccgatcaccagcgcgccggcccagacgccagcggataataacgctgtcgtggcgccttcccaggccaatgtcgataccgcggggacgacgccggcagctccggctaccaccccagcctcgccgttgccgaccgatcaggcgaacgtcacgactccggcggcgtcggcgcaggatctggtgatgaacttttccgccgactgctggctggaagtgagcgatgccaccggtaaaaaactgttcagcggcctgcagcgtaaaggcggtaacctgaacctgagcggtcaggcgccgtataagctgaaaattggcgccccggccgcggtacagatccagtatctgggcaagcctgtcgatttaagtcgttttatcagaactaaccaggttgcgcgtctgaccctcaatgccgaatcatcaccggcgcagtaacagacgggtaacgcgggagatttttcatgcataaccaggctccgattcaacgtagaaaatctaaacgtatttacgttggtaatgtgccaattggcgatggggctcccatcgccgttcagtcaatgaccaatacgcgcaccaccgatgtggcggcgaccgtaaatcaaatcaaagcgttagagcgcgtaggcgcggacattgtccgtgtctctgttccgacgatggacgctgctgaggcgttcaaacttatcaaacagcaggttaacgtcccgctggtcgccgatatccactttgactaccgtattgcgctgaaagtggcggaatatggcgtcgactgcctgcgtatcaacccgggcaacatcggcaacgaagagcgcatccgcatggttgtagattgcgctcgcgataaaaacatcccgatccgcatcggcgtcaacgccggctcgctggaaaaagatctgcaggaaaaatatggcgagccgacgccgcaggcgctgctcgaatccgccatgcgtcatgtcgatcatctcgatcgtctgaacttcgatcagtttaaagtcagcgttaaagcctccgatgtcttcctggcggtggaatcctatcgtctgctggcgaaacagatcgatcagccgctgcatctcgggatcaccgaagcgggcggcgcgcgcagcggcgcggtaaaatcggcgatcggtctgggactcctgctgtccgaggggatcggcgatacgctgcgcgtctcgctggcggcggatccggtggaagagatcaaggtcggcttcgatatcctcaaatctctgcgtattcgttcccgcggcattaactttatcgcctgcccgacctgttcacgccaggagtttgacgttatcggtacggtgaatgctctggagcagcgtctggaagatatcatcaccccgatggatgtttcgatcatcggttgcgtggtgaacggcccgggcgaagcgctggtctccacccttggcgtcaccggcggcaacaagaaaagcggcctgtatgaagacggcgtgcgtaaagatcgcctggacaacaacgacatgatcgaccagctggaagcgcggatccgcgccaaagcctcgatgctcgatgaagcccgtcggattgacgttcaacaggttgaagcaaaataacgtgttgggaagcgatacgcttcccgtgtatgattgaacctgcgggcgcgaggcgccggggttcatttttgtatatataaagagaataaacgtggcaaagaacattcaagccatccgtggcatgaacgattatctgccgggcgaaaccgctctctggcagcgcattgaaggctcactgaagcaggtgctcggtagctacggttacagcgaaatccgtttgccgattgtagagcagaccccgttattcaaacgcgcgatcggcgaagtgaccgacgtggttgaaaaagagatgtataccttcgaagaccgcaatggcgacagcctgacgctgcgtccggaagggacggcgggctgcgtacgtgccggcatcgaacatggtctgctgtacaatcaagaacagcgtctgtggtacgtcgggccaatgttccgtcacgagcgcccgcagaaaggtcgctaccgccagttccatcagatcggcgccgaagtgtttggcctgcagggcccggacatcgacgcggagctgattatgctgaccgcgcgctggtggcgtgagctgggcatctccgagcacgtcagcctggagctgaactccatcggttcgctggaagcgcgcgccaactaccgcgacgcgctggtggcatacctggagcagtttaccgataaactggatgaagacagtaaacgccggatgtataccaacccgctgcgggtgctggactccaaaaacccggacgttcaggcgctgctcaacgacgcgccggcgctcggcgattatcttgacgaagagtcgaaagcccactttgccggcctgtgcgcgctgcttgacgatgccgggatccgctacaccgtcaaccagcgcctggtgcgcggccttgattactataaccgcaccgtgttcgagtgggtgaccaccagccttggttcccagggcaccgtctgcgccggcggtcgttacgacggcctggttgagcagctgggcggtcgcgctaccccgggcgtgggttttgccatgggtctggaacgtcttgttttactggtccaggcagtgaatccggaatttaaagccgatcctgttgtcgatatatacctggtagcctccgggaccgatactcagtctgctgcaatgcgtctggctgagcaggttcgcgatgcgctgcccggcgtgaagctgatgaccaaccacggcggcggcaactttaagaagcagttcgcccgcgctgacaagtggggggcgcgcgtcgcgctggtggtcggtgaatcagagattgctgacggaaacgtggtagtgaaggatttacgctcaggtgagcaaactaccgtaacgcaggagagcgttgccgcgcatttgcgcacacttctgggttaatctcccgggaattattagtcaggagaaggactgcgtggaaacttttaacaacgagaacgatcaggtcgatgcgctgaagcgtttctttgccgaaaacggcaaagcgctagcggtcggggtgattttagggattggcgcgctggttggctggcgctactggacctcccatcagcaggataccgccagagacgcgtcgctggcttacgagaaggcgacttccgcgctgaaatcgaatacgccagaagtgctgtcaggggcagagaaattcgcggctgacaataaaaatacctacggcgccttcgcctctctcgagctggcacagcattttgttgaacagaacgatctgccgaacgctgaaaagcagctgcagcaggggctggcggccgcatctgatgataatctgaaatcggttatcagtatgcgtctggcccgcgttcagctgcaaatgaaacaggctgatgcggcgctgaaaaccctcgacagcatcaaaggtgagggctggaccgccattgtggccgatttgcgcggcgaaattctgttgagcaaaggcgataagcaaggggcccgtgcggcgtgggaagctggcgtgaaaagcgatgcttctcctgcgctcagcgaaatgatgcgtatgaaaatgaataatttgtccatctgagagggactcgatgcaattgcgtaaattactgttgccagggctgctttccgttaccttgctgagcgggtgttcgctgtttaatagcgaagaagatgtggtgaaaatgtcaccgctgccgacggtagaaaaccagtttacgccgtccacgtcctggagcacctcggttggcgatggtatcggcgaattttactctaaccttcatccggcctttgccgacggcgtagtgtatgctgctgaccgtaaaggcaccgtcaaagcgctgaacgccgacgacggcaaagaggtgtggtcggtgaatctggcggagaaagatggctggttctcgcgcacgccagcgctgctttctggcggggtgaccgtctctggcggccatgtttatatcggcagcgagaaagcgcagctgtatgcgctgaataccagcgatggtaccgtggcctggcaaacccgtgtcgccggcgaggcgctgtcgcgtccggtggtgagcgatggcatggtgctggtgcataccagtaacggccagctgcaggcgctaaacgagaccgatggggccgtgaagtggaccgttaacctcgatatgccggcgctctccctgcgcggcgagtctgcgcctgcgaccgcctacggcgcggcgatcgtcggcggcgacaacggccgcgtcagtgcagtattgatgcagcaggggcagatgatttggcagcagcgtatttctacggccaccggcccgacggaaattgaccgcctgaacgacgtcgacacgacgccgatcatcgttaacggtgtggtttatgcgctggcttataacggtaacctgaccgcgctggacctgcgtagcggccagattatgtggaaacgcgagctgggttcggtgaatgatttcatcgtcgatggtaaccgtatctacctggtagaccagaacgatcgcctgctggcactgaccaccgacggcggtgtaaccctgtggacgcaaagcgatctgctgcaccgtttgctgaccgcgccggtgttgtataatggcaatctggtcgtcggcgatagcgaaggctacatgcactgggttaatccggaagatggccattttgtggcgcagcagaaagtggacagctccggcttcctgaccgacc

SEQ ID NO: 5353 - DNA, 3175 bp, Unknown
  gut microbiota DNA sequence
atcacctttttcaatggtcatccagccttcgaggctgaagcgggcgcttttcagggcgatattgtcctgcatccagcgtcccagccacggtttgacgtcgatatcatccgcctgcagccagacccggcctttattcagcaggccatcctcatcgcgaagatccatccgcacctgcatgacgccatgctggccggtgaggctggagaggctgagctgcccctcggcgcgatgacggttcctgccgttaagccatgtcagctgcggaaccgccagctccgcccgctgaccggaaagggtcaggaagctcagatggctgtcgcgcagagtaaagtgatcgaactgacgtaaaaagagatcgctgatgcggtcggttttcaggctttcgccaccgtcattggtctgaataggggtattggtatggacctgcagctgccagaaggtgaggtcgcggaactgccagcgcatatgcagcaggctctgccagacatccagcgccagggttacgcgcttgaccgccattgtgccgccatctttcagcccgacatggatatcgcgggcgtctaacgtcggaccaaaagtctgccagctggcggtgatctgcgaggcgtccaccggcgtaccggtgagggtggagatcttctccagcagctgcggacgccaggcgtcgagctgtggcaacacgagacgcaagccactcaccagcagcgcgacgataacaatcaatgttgccacggtgagcaataaaatcccgggcagtcgcctcacgcctctctccttgtcagccgcacaatgacgcggtgtcttacatcataaccacatcgaactgctcttgattatagagcggctcaatttgtaccttcacctgcttgccgacaaagatttccacttccgccagcgcatgcgactcttcccctttcagggtttccgccaccgcaggggaagcatagaccaggaagcgatcggaatcataagcatgatgtacgcggacgatctcacgcataatctcatagcacaccgtttccaccgactttaccgttccacgtccgtggcaggttgggcactcgttgcacagcacatgctccacgctttcacgggtgcgtttacgggtcatctccaccaggcccagctgggagaagccgttaatgctcgtcttcacccgatctttactcagcgcctgctctaaagagtgcaacacccgtcgacggtgatcttcattgttcatgtctatgaaatcaatgatgataatgccgccgagattacgcaaacgtagctggcgggctatcgcctgggtggcttcgatgttggtattgaagatcgtatcgtcaagattgcggtgcccgacaaaggccccggtgttgatatcgatggtggtcatcgcctcggtctggtcgatgatcagatagccccccgatttgagctcgactttacgctccagcgcgcgctgaatttcgttctcaacgtcaaagagatcgaatatcggctgacggccgctgtagtgttccagcttgctggtcatttccgggatatattcggcggtgaattcgagcaacgcctcataggtcaggcgcgagtcgacgcgaatgcgatccagttgcgcatcggcaaaatcacgcagcacgcgctgggccagagccagctcgccatacagctgatagcgggtctggttgcgctttttgcgctccatcaccttggtccatacgcgcttaagataagcggcatcggcggccatctcctgctcgtgaacgccttccgcagcggtgcgaatgataaacccgccctgctcatcgcaatattctgcgacgaccttttttaggcgctcgcgctcggcttcgctttcaatccgctgagagacccccacgtgggaggcgcctggcataaagaccagatagcgggaaggcagggtaatatcggtggtcagacgcgcgcctttggtacccagcggatctttaaccacctggaccatcaggtcctggccctggcgcaccagctccgaaatatcgcgcacggtaaactgcttttgctcctcaccggcgacgcactcggtatgcggcatgatatcggaggcgtgaaggaacgccgccttatccagaccaatatctacaaaagccgcctgcattcccggcagcactcggctaacacgacctttgtagatattgcctactattccgcgtcgcgcttcacgctcaatatggatttcctgcagaataccgccatcaatatacgcaacgcgcgtttcggatggcgttacgttaactaataattcagccgtcatctttatccctttcctttacgcagtgagttaaagttactgagcaactcatacgtttccaccagcggtaagccgactacggcgtgatagctgccattaatcttcctgacgaagcaaccacccaacccttgaataccgtatgcacctgctttatctaaaggctcgccgctggccacataatcggcgatatcctgctcgctgagccgccggaaggtcacttccgtgaccaccagacagtccagcgtttgctgcttatccgccagcgccaccgcggtcataacctgatgggtgtggccggaaagcaaacgcagcatcgctgcagcgtgttcggcgtcgcgcggtttttccagcacttcgccgttcaaaatgacaatcgtatccgctcccagcaccggcaaatcgcgggtggccatcgccaccccggcctgcgctttttcgcgcgccaggcggacgacatagtgctgggcgctctcctgcggctggcgctgctcctcgataccaggaaccagacgctcgaaagcgagaccaagctgagtcagcagttcctgccgacgcggggaaccagaagcgagatacagagttgtcatatcaaccttattgcactgcaaattgctgacgcactttacgcatcagcaggaagagccatggccagaggatgccgtttactacactactccagaatacttccggacggaaagagacgttgatcactaaaaactctgcccagaaaacaatgatatccacggccagggataacagcattaccaccagcgcctgctgccacagcgccaggttacggaacagctgatacttcagcgcgaccagataggcgacgatgcttaaagacagcgcgcgaacgccgagcgttgaaccgctgatgagatcaagaatagcccccatcacgaa
